United States Patent Application Publication US 2023/0390346 A1 - sequence listing, part 11

SEQ ID NO: 16 - DNA, 4089676 bp, Bacillus subtilis (residues 1-2,044,838 of 4,089,676)
atggaaaatatattagacctgtggaaccaagcccttgctcaaatcgaaaaaaagttgagcaaaccgagttttgagacttggatgaagtcaaccaaagcccactcactgcaaggcgatacattaacaatcacggctcccaatgaatttgccagagactggctggagtccagatacttgcatctgattgcagatactatatatgaattaaccggggaagaattgagcattaagtttgtcattcctcaaaatcaagatgttgaggactttatgccgaaaccgcaagtcaaaaaagcggtcaaagaagatacatctgattttcctcaaaatatgctcaatccaaaatatacttttgatacttttgtcatcggatctggaaaccgatttgcacacgctgcttccctcgcagtagcggaagcacccgcgaaagcttacaaccctttatttatctatgggggcgtcggcttagggaaaacgcacttaatgcatgcgatcggccattatgtaatagatcataatccttctgccaaagtggtttatctgtcttctgagaaatttacaaacgaattcatcaactctatccgagataataaagccgtcgacttccgcaatcgctatcgaaatgttgatgtgcttttgatagatgatattcaatttttagcggggaaagaacaaacccaggaagaatttttccatacatttaacacattgcacgaagaaagcaaacaaatcgtcatttcaagtgatcgaccgccaaaggaaattccgacacttgaggacagattgcgctcacgttttgaatggggacttattacagatatcacaccgcctgatctagaaacgagaattgcgattttaagaaaaaaagccaaagcagaaggcctcgatattccgaacgaggttatgctttacatcgcgaatcaaatcgacagcaatattcgggaactcgaaggagcattaatcagagttgtcgcttattcatctttaattaataaagatattaatgctgatctggccgctgaggcgttgaaagatattattccttcctcaaaaccgaaagtcattacgataaaagaaattcagagggtagtaggccagcaatttaatattaaactcgaggatttcaaagcaaaaaaacggacaaagtcagtagcttttccgcgtcaaatcgccatgtacttatcaagggaaatgactgattcctctcttcctaaaatcggtgaagagtttggaggacgtgatcatacgaccgttattcatgcgcatgaaaaaatttcaaaactgctggcagatgatgaacagcttcagcagcatgtaaaagaaattaaagaacagcttaaatagcaggaccggggatcaatcggggaaagtgtgaataacttttcggaagtcatacacagtctgtccacatgtggataggctgtgtttcctgtctttttcacaacttatccacaaatccacaggccctactattacttctactattttttataaatatatatattaatacattatccgttaggaggataaaaatgaaattcacgattcaaaaagatcgtcttgttgaaagtgtccaagatgtattaaaagcagtttcatccagaaccacgattcccattctgactggtattaaaattgttgcatcagatgatggagtatcctttacagggagtgactcagatatttctattgaatccttcattccaaaagaagaaggagataaagaaattgtcactattgaacagcccggaagcatcgttttacaggctcgcttttttagtgaaattgtaaaaaaattgccgatggcaactgtagaaatcgaagtccaaaatcagtatttgacgattatccgttctggtaaagctgaatttaatctaaacggactggatgctgatgagtatccgcacttgcctcagattgaagagcatcatgcgattcagatcccaactgatttgttaaaaaatctaatcagacaaacagtatttgcagtgtccacctcagaaacacgccctatcttgacaggtgtaaactggaaagtggagcaaagtgaattattatgcactgcaacggatagccaccgtcttgcattaagaaaggcaaaacttgatattccagaagacagatcttataacgtcgtgattccgggaaaaagtttaactgaactcagcaagattttagatgacaaccaagaacttgtagatatcgtcatcacagaaacccaagttctgtttaaagcgaaaaacgtcttattcttctcacggcttctggacgggaattatccagacacaaccagcctgattccgcaagacagcaaaacagaaatcattgtgaacacaaaagaattccttcaggccattgatcgtgcatctcttttagctagagagggacgcaacaacgttgtaaaactgtccgcaaaaccggctgaatccattgaaatttcttccaactccccggaaatcggtaaagttgtggaagcaattgctgcggatcaaattgaaggtgaggaattaaatatctcttttagtccaaaatatatgctggatgcactaaaggtgcttgaaggagcagaaatacgcgtaagctttacaggcgcaatgagacctttcttaattcgcacgccgaatgatgaaacgattgtacagcttatcctccctgtcagaacctattaatccgatacactgctgccgacccgtcggcagcttttctattcggtatctgctccgacaagttttccctttccctaattcgtttttttttagtacaattagatattagtgatatttgaaagaggtcgatataatggcaaatccgatttcaattgatacagagatgattacactcggacaattcttaaaattagccgatgtgattcagtctggcggtatggcgaagtggtttttaagcgagcatgaagtgcttgtgaacgatgagccggacaaccgccggggcagaaaactgtatgttggagatgtggtagagattgaaggatttggttcatttcaagtcgtcaattaaagcgggtgacactgattgtatatccagaacttagaactgacatcttaccgcaactacgaccatgctgaacttcaatttgaaaataaagtaaatgtgatcatcggagaaaacgcccaggggaagacaaacctcatggaggcgatctatgtcttgtccatggcgaaatcgcaccggacatcaaatgacaaagaacttatacggtgggacaaagactatgctaaaatagagggaagagtgatgaagcaaaacggggcgatcccgatgcagctcgtcatctccaaaaagggtaaaaagggcaaggtcaatcatattgaacagcaaaagctcagccagtatgtcggagccctcaacaccattatgttcgcgccggaagatttaaatcttgtaaagggaagccctcaagtgagaaggcggtttcttgacatggaaatcggacaggtttctctcgtctaccttcatgatctttctctttaccagaaaatcctttcccagcggaatcattttttgaaacagctgcaaacaagaaaacaaactgaccggacgatgctcgatgttctgaccgatcagcttgtagaagttgcagcaaaagtcgtcgtaaaacgcctgcagtttacagcacagctcgagaaatgggcgcagcccatccatgcaggcatctcaagagggcttgaagaactgaccctgaaataccatacagctcttgaggtatcagatcccctagatttgtcgaaaataggagatagctatcaagaagcgttttctaaattaagagaaaaagaaattgagcgtggtgtgacgctgtcagggcctcatcgcgatgatgttcttttctatgtgaacggacgcgatgtgcagacgtatggttctcaaggacagcagcgaacgacggcgttgtcccttaagctggcggagattgacctgatccatgaagaaatcggagaatatcccattttactattggatgatgtactgagtgaactggatgattatcgccagtcacacttgcttcatacgatccaaggccgtgtacaaacgtttgtcacaacgacaagcgttgatggcattgatcacgaaaccttacgtcaagcaggaatgttccgtgtgcaaaatggtgcgttagtgaagtgaagaaatgaggtgagcaattgtatattcatttaggtgatgactttgtggtttcaacacgagatattgtcggcatttttgactttaaagccaacatgtcgcctattgttgaagaatttctgaaaaaacagaaacacaaggtggtgcctttcgtaaacggcacgcccaaatctatcgtagtcacggttcagaatatatattactctcccttatcttccagcacattaaaaaaacgtgcgcaatttatgtttgaaatagattcttagaaattttttatcacgaatatatcgtttagaaaagtgtaggtgaatgacgtggctatggaacagcagcaaaacagttatgatgaaaatcagatacaggtactagaaggattggaagctgttcgtaaaagaccggggatgtatatcggttcgacaaacagcaaaggccttcaccacctggtatgggaaattgtcgacaatagtattgacgaagccctcgccggttattgtacggatatcaatatccaaatcgaaaaagacaacagtatcacggttgtagataatggccgcggtattccagtcggtattcatgaaaaaatgggccgtcctgcggtagaagtcattatgacggtacttcatgccggaggaaaatttgacggaagcggctataaagtatccggaggattacacggtgtaggtgcgtctgtcgtaaacgcactatcaacagagcttgatgtgacggttcaccgtgacggtaaaattcaccgccaaacttataaacgcggagttccggttacagaccttgaaatcattggcgaaacggatcatacaggaacgacgacacattttgtcccggaccctgaaattttctcagaaacaaccgagtatgattatgatctgcttgccaaccgcgtacgtgaattagcctttttaacaaagggcgtaaacatcacgattgaggataaacgtgaaggacaagagcgcaaaaatgaataccattacgaaggcggaattaaaagttatgtagagtatttaaaccgctctaaagaggttgtccatgaagagccgatttacattgaaggcgaaaaggacggcattacggttgaagtggctttgcaatacaatgacagctacacaagcaacatttactcgtttacaaacaacattaacacgtacgaaggcggtacccatgaagctggcttcaaaacgggcctgactcgtgttatcaacgattacgccagaaaaaaagggcttattaaagaaaatgatccaaacctaagcggagatgacgtaagggaagggctgacagcgattatttcaatcaaacaccctgatccgcagtttgagggccaaacgaaaacaaagctgggcaactcagaagcacggacgatcaccgatacgttattttctacggcgatggaaacatttatgctggaaaatccagatgcagccaaaaaaattgtcgataaaggcttaatggcggcaagagcaagaatggctgcgaaaaaagcccgtgaactaacacgtcgtaagagtgctttggaaatttcaaacctgcccggtaagttagcggactgctcttcaaaagatccgagcatctccgagttatatatcgtagagggtgactctgccggaggatctgctaaacaaggacgcgacagacatttccaagccattttgccgcttagaggtaaaatcctaaacgttgaaaaggccagactggataaaatcctttctaacaacgaagttcgctctatgatcacagcgctcggcacaggtattggggaagacttcaaccttgagaaagcccgttaccacaaagttgtcattatgacagatgccgatgttgacggcgcgcacatcagaacactgctgttaacgttcttttacagatatatgcgccaaattatcgaaaatggctacgtgtacattgcgcagccgccgctctacaaggttcaacaggggaaacgcgttgaatatgcgtacaatgacaaggagctggaagagctgttaaaaactcttcctcaaacgcctaagcctggactgcagcgttacaaaggtcttggtgaaatgaatgccacccagctatgggagacaaccatggatcctagttccagaacacttcttcaggtaactcttgaagatgcaatggatgcggacgagacttttgaaatgcttatgggcgacaaggtagaaccgcgccgaaacttcatagaagcgaatgcgagatacgttaaaaatcttgacatctaatcataaaaagccttatttccaataagaaataaggcttttttctgaacaagatcagatgcagcaatgcttgcagtacctatatattctagcaatttaatgtgtataatcataagtttattgatataatggagaatagtgaaatcgtattgaaggtcataatggacaatctactcccacatatttcatgtgatacttcagggaggttttttaatgagtgaacaaaacacaccacaagttcgtgaaataaatatcagtcaggaaatgcgtacgtccttcttggattatgcaatgagcgttatcgtgtcccgtgctcttccagatgttcgagacggtttaaaaccggttcatagacggattttgtatgcaatgaatgatttaggcatgacaagtgacaagccttataaaaaatccgcgcgtatcgttggagaagttatcgggaaataccacccgcacggtgattcagcggtatatgaatccatggtcagaatggctcaggatttcaactaccgttatatgctcgttgacggtcacggaaacttcggttctgttgacggagactcagcggcggccatgcgttatacagaagcaagaatgtctaaaatctcaatggagattcttcgcgacatcacaaaagacacaatcgattaccaggataactatgacgggtcagaaagagaacctgtcgttatgccttcaaggttcccgaatctgctcgtgaacggtgctgccggcattgcggtaggtatggcaacaaacattcctccgcaccagctgggagaaatcattgacggtgtacttgctgtcagtgagaatccggacattacaattccagagcttatggaagtcattccagggcctgatttcccgaccgcgggtcaaatcttgggacgcagcggtatccggaaagcatacgaatcaggccgaggctctatcacgatccgggcaaaagctgagatcgaacaaacatcttcgggtaaagaaagaattatcgttacagagttaccttaccaagtaaataaggctaaattaattgagaaaattgcagatctcgtaagggacaaaaagatagagggtatcacagatctgcgtgatgagtcagatcgtacaggtatgagaattgtcattgaaatcagacgcgacgccaatgcaaatgtcatcttaaacaatctgtacaaacaaactgctctacaaacatcttttggcatcaacctgcttgcacttgttgatggccagccgaaagttttaactcttaagcaatgcctggagcattacctcgaccatcaaaaagttgtcattagacgccgtactgcttatgaattgcgtaaagcggaagcgagagctcatatcctggaaggattgagagttgcactggatcatctcgatgcagttatctcccttatccgtaattctcaaacggctgaaattgcgagaacaggtttaattgaacaattctcactgacagagaagcaagcacaagcgatccttgatatgaggctccagcgtttaacgggactggaacgtgaaaagatagaagaagaataccaatctcttgttaaattaattgcagagctaaaagacatcttggcaaatgaatataaagtgcttgagatcattcgtgaagaactcacggaaatcaaagagcgttttaacgatgaaagacgtactgagatcgtcacttctggactggagactattgaagatgaagatctcatcgagagagaaaatatcgtagttactctgacgcacaacggatacgtcaaacgtcttcctgcatcaacttaccgcagtcaaaaacgaggcggaaaaggtgtacaaggtatgggaacaaacgaagatgatttcgttgagcatttgatctctacgtcaactcatgacacgattctcttcttctcgaacaaggggaaagtgtatcgtgcaaaagggtatgaaatccctgaatacggcagaacggcaaaaggaatcccgattattaacctgctggaggtagaaaagggtgagtggatcaacgcgattattccagtcacggaattcaatgcggagctttaccttttcttcactacaaagcatggggtttcaaaacgaacatcgctatctcaattcgctaatatccgcaacaatggtctaatcgctctgggtcttcgtgaagatgatgaactgatgggtgtacgtctgactgacggcacaaaacaaatcatcattggaacgaaaaacggtttactgatccgtttccctgaaacagatgtccgggagatgggaagaactgcggcgggcgtaaaaggcatcaccctgacggatgacgacgttgttgtcggcatggagatattagaggaagaatcacacgtccttatcgtaactgaaaaagggtacggaaaacgaactccggctgaagagtacagaacccaaagccggggcggaaaaggactcaaaacagcgaaaatcaccgagaacaacggccaactagtagcagtgaaagctactaaaggtgaagaggatctaatgattattacagctagcggcgtactcatcagaatggacatcaatgatatctccatcaccggacgtgtcactcaaggtgtgcgtctcatcagaatggcagaagaagagcatgttgctacagtagctttagtagagaaaaacgaagaagatgagaatgaagaagaacaagaagaagtgtgagaaaaagcgcagctgaaatagctgcgcttttttgtgtcataaccctttacagtcataaaaattatggtataatcatttttgttgtctttttaaagacacaagcatgaccattatgactagtaaaaacttttttaaaaaagtattgacctagttaactaaaaatgttactattaagtagtcgcttcgagagaagcacacaaagttctttgaaaactaaacaagacaaaacgtacctgttaattcatttttaaaaatcgcacagcgatgtgcgtagtcagtcaaactagggcctgcacgacgcaggtcacacaggtgtcgccgcaggatgcggtgaacttaacctgtgatccatttatcggagagtttgatcctggctcaggacgaacgctggcggcgtgcctaatacatgcaagtcgagcggacagatgggagcttgctccctgatgttagcggcggacgggtgagtaacacgtgggtaacctgcctgtaagactgggataactccgggaaaccggggctaataccggatggttgtttgaaccgcatggttcaaacataaaaggtggcttcggctaccacttacagatggacccgcggcgcattagctagttggtgaggtaacggctcaccaaggcaacgatgcgtagccgacctgagagggtgatcggccacactgggactgaggcacggcccagactcctacgggaggcagcagtagggaatcttccgcaatggacgaaagtctgacggagcaacgccgcgtgagtgatgaaggttttcggatcgtaaagctctgttgttagggaagaacaagtaccgttcgaatagggcggtaccttgacggtacctaaccagaaagccacggctaactacgtgccagcagccgcggtaatacgtaggtggcaagcgttgtccggaattattgggcgtaaagggctcgcaggcggtttcttaagtctgatgtgaaagcccccggctcaaccggggagggtcattggaaactggggaacttgagtgcagaagaggagagtggaattccacgtgtagcggtgaaatgcgtagagatgtggaggaacaccagtggcgaaggcgactctctggtctgtaactgacgctgaggagcgaaagcgtggggagcgaacaggattagataccctggtagtccacgccgtaaacgatgagtgctaagtgttagggggtttccgccccttagtgctgcagctaacgcattaagcactccgcctggggagtacggtcgcaagactgaaactcaaaggaattgacgggggcccgcacaagcggtggagcatgtggtttaattcgaagcaacgcgaagaaccttaccaggtcttgacatcctctgacaatcctagagataggacgtccccttcgggggcagagtgacaggtggtgcatggttgtcgtcagctcgtgtcgtgagatgttgggttaagtcccgcaacgagcgcaacccttgatcttagttgccagcattcagttgggcactctaaggtgactgccggtgacaaaccggaggaaggtggggatgacgtcaaatcatcatgccccttatgacctgggctacacacgtgctacaatggacagaacaaagggcagcgaaaccgcgaggttaagccaatcccacaaatctgttctcagttcggatcgcagtctgcaactcgactgcgtgaagctggaatcgctagtaatcgcggatcagcatgccgcggtgaatacgttcccgggccttgtacacaccgcccgtcacaccacgagagtttgtaacacccgaagtcggtgaggtaaccttttaggagccagccgccgaaggtgggacagatgattggggtgaagtcgtaacaaggtagccgtatcggaaggtgcggctggatcacctcctttctaaggatattatacggaatataagaccttgggtcttataaacagaacgttccctgtcttgtttagttttgaaggaactttgttccttgaataagttaagatgggcctgtagctcagctggttagagcgcacgcctgataagcgtgaggtcggtggttcgagtccactcaggcccaccatcttatataacggggccttagctcagctgggagagcgcctgctttgcacgcaggaggtcagcggttcgatcccgctaggctccaccaacgtgttctttgaaaactagataacagtagacatcacattcaattagtaatacaagatatcacatagtgattctttttaacggttaagttagaaagggcgcacggtggatgccttggcactaggagccgatgaaggacgggacgaacaccgatatgcttcggggagctgtaagcaagctttgatccggagatttccgaatggggaaacccaccactcgtaatggagtggtatccatatctgaattcataggatatgagaaggcagacccggggaactgaaacatctaagtacccggaggaagagaaagcaaatgcgattccctgagtagcggcgagcgaaacgggattagcccaaaccaagaggcttgcctcttggggttgtaggacactctgtacggagttacaaaggaacgaggtagatgaagaggtctggaaaggcccgccataggaggtaacagccctgtagtcaaaacttcgttctctcctgagtggatcctgagtacggcggaacacgtgaaattccgtcggaatccgggaggaccatctcccaaggctaaatactccctagtgaccgatagtgaaccagtaccgtgagggaaaggtgaaaagcaccccggaaggggagtgaaagagatcctgaaaccgtgtgcctacaagtagtcagagcccgttaacgggtgatggcgtgccttttgtagaatgaaccggcgagttacgatcccgtgcaaggttaagcagaagatgcggagccgcagcgaaagcgagtctgaatagggcgcatgagtacgtggtcgtagacccgaaaccaggtgatctacccatgtccagggtgaagttcaggtaacactgaatggaggcccgaacccacgcacgttgaaaagtgcggggatgaggtgtgggtaggggtgaaatgccaatcgaacctggagatagctggttctctccgaaatagctttagggctagcctcaaggtaagagtcttggaggtagagcactgattggactaggggcccctaccgggttaccgaattcagtcaaactccgaatgccaatgacttatccttgggagtcagactgcgagtgataagatccgtagtcgaaagggaaacagcccagaccgccagctaaggtcccaaagtatacgttaagtggaaaaggatgtggagttgcttagacaaccaggatgttggcttagaagcagccaccatttaaagagtgcgtaatagctcactggtcgagtgactctgcgccgaaaatgtaccggggctaaacgtatcaccgaagctgcggactgttcttcgaacagtggtaggagagcgttctaagggctgtgaagccagaccggaaggactggtggagcgcttagaagtgagaatgccggtatgagtagcgaaagaggggtgagaatcccctccaccgaatgcctaaggtttcctgaggaaggctcgtccgctcagggttagtcgggacctaagccgaggccgaaaggcgtaggcgatggacaacaggttgatattcctgtaccacctcctcaccatttgagcaatggggggacgcaggaggatagggtaagcgcggtattggatatccgcgtccaagcagttaggctgggaaataggcaaatccgtttcccataaggctgagctgtgatggcgagcgaaatatagtagcgaagttcctgattccacactgccaagaaaagcctctagcgaggtgagaggtgcccgtaccgcaaaccgacacaggtaggcgaggagagaatcctaaggtgatcgagagaactctcgttaaggaactcggcaaaatgaccccgtaacttcgggagaaggggtgctctgttagggtgcaagcccgagagagccgcagtgaataggcccaggcgactgtttagcaaaaacacaggtctctgcgaagccgtaaggcgaagtataggggctgacgcctgcccggtgctggaaggttaagaggagcgcttagcgtaagcgaaggtgcgaattgaagccccagtaaacggcggccgtaactataacggtcctaaggtagcgaaattccttgtcgggtaagttccgacccgcacgaaaggcgcaacgatctgggcactgtctcaacgagagactcggtgaaattatagtacctgtgaagatgcaggttacccgcgacaggacggaaagaccccgtggagctttactgcagcctgatattgaatgttggtacagcttgtacaggataggtaggagccttggaaaccggagcgccagcttcggtggaggcatcggtgggatactaccctggctgtattgaccttctaacccgccgcccttatcgggcggggagacagtgtcaggtgggcagtttgactggggcggtcgcctcctaaaaggtaacggaggcgcccaaaggttccctcagaatggttggaaatcattcgcagagtgtaaaggcacaagggagcttgactgcgagacctacaagtcgagcagggacgaaagtcgggcttagtgatccggtggttccgcatggaagggccatcgctcaacggataaaagctaccccggggataacaggcttatctcccccaagagtccacatcgacggggaggtttggcacctcgatgtcggctcatcgcatcctggggctgtagtcggtcccaagggttgggctgttcgcccattaaagcggtacgcgagctgggttcagaacgtcgtgagacagttcggtccctatccgtcgcgggcgcaggaaatttgagaggagctgtccttagtacgagaggaccgggatggacgcaccgctggtgtaccagttgttctgccaagggcatcgctgggtagctatgtgcggacgggataagtgctgaaagcatctaagcatgaagcccccctcaagatgagatttcccattccgcaaggaagtaagatccctgaaagatgatcaggttgataggtctgaggtggaagtgtggcgacacatggagctgacagatactaatcgatcgaggacttaaccatatttttgaatgatgtcacacctgttatctagttttgagagaacactctcaatttgtttggtggcgatagcgaagaggtcacacccgttcccataccgaacacggaagttaagctcttcagcgccgatggtagtcgggggtttccccctgtgagagtaggacgccgccaagcaagcttaaacccagctcattgagctgggttttttgtttgttaaaaatgaagaagaaactgtgaagcgtatttagggaatttattttctgatactaataaaaactgctgaattaacacgtagtcatcacttatatgctgtgttaataactcataccaccattctgtttcataccttgcaatcatcccaacgttgtacaaaatcaaataatgaattgtcatttcgggaagcctcagaaattgctccctttgagaagggatataatattggttcttttccatgtcaaacaataagctggtcgatgtccatggctccttgtcttgtggtgaaatttcgaacagcagcccgtgttcatttttttttgtaaaagaccattgataatgatgggacatgtattcagcaaaccttgaatcagacattttgtaattgattactacttcctccggtataaaaatttcgttcttatccttctcaacttttgtcataaatcgttctttctgctgaaagtagaaaatatcgctaagttctggaatggccattaataattttttcatggtataccgttcatctactatatccgattgtccaaataaatgtttcataaaatgtacgcataggccattccgttgtattttcacttcatcgtcgctaaaacaataattttgtttctttcgttttcttgttgttacgccatgtgccagtactgatgtatggcttggataatgaggatcacgtgtaattaagcatgctttgataagctgtgccattccataaaataaaagaatcggtttgatttctaagggagaatatgcagcttgtttataaaacgattcggcatgctttaagaaataaataaaccgttcactgtttttaaaagagttttttttcgcatcgtcaataccgtttaagatataaaccttttctagaaatttctgggttgattcaacggagtaaaatagcgctaagtctttccactcatgatatgtcatgtatatttcttaatcctttccgttatctaaatatttcaactctttcccgcttccttgacatgctcttggctagttgataatctacatataatattttgccgaaaagagggggatttactaatgtgggaaagtaaattttcaaaagaaggcttaacgttcgacgatgtgctgcttgtaccagcaaagtctgaggtacttccgcgtgatgtggatttatctgtagaacttacaaaaacgttaaagctaaatattcctgtcatcagcgcaggtatggacactgtaacagaatcagcaatggcaattgcaatggcaagacagggcggcttgggcatcattcacaaaaatatgtccattgaacagcaggctgaacaagttgataaagtaaagcgttctgagcgcggcgttatcacaaatcccttctttttaactcctgatcaccaagtatttgatgcggagcatttgatggggaaatacagaatttccggtgttccgattgtaaataacgaagaagaccagaagcttgttggaattattacaaaccgtgaccttcgttttatttctgactactcaatgaaaatcagcgacgtcatgacgaaagaagagctagttactgcatctgtaggaactactctggatgaagctgaaaagattttgcagaaacataaaattgaaaagcttcctctcgtagatgaccagaataaattaaaaggtcttatcacaattaaagacattgaaaaagtcattgagttcccgaactcatctaaagacattcacggccgcctgatcgttggcgcggcagttggtgtaactggcgatacaatgactcgcgtcaaaaagcttgttgaagccaatgttgatgtgattgttatcgatacagctcacggacactctcaaggcgttttaaacacagtcacaaaaattcgtgaaacgtatcccgaattaaacattattgctggaaacgtggcaacagctgaagcgacaagagcgcttatcgaagctggagcagacgttgtcaaagttggaataggacctggttcaatttgtactacacgtgttgtagccggcgtcggtgttccgcaaattacagcaatttatgattgtgcgactgaagcaagaaaacacggcaaaacaatcatagccgatggtgggattaaattctctggcgatatcactaaagcgttggcagccggcggacatgctgttatgctcggaagcttgcttgcaggcacatctgaaagccctggtgaaactgaaatctatcaaggcagaagatttaaggtataccgcggcatgggatcagttgctgcaatggaaaaaggaagtaaagaccgttacttccaagaagaaaacaaaaaatttgttcctgaaggaattgaaggacgcacaccttacaaagggccagttgaagaaaccgtttatcagctagtcggaggccttcgttctggtatggggtattgcgggtccaaagatctgcgtgcgctaagagaagaagctcagttcattcgcatgactggcgcaggacttcgcgaaagccatccgcatgacgtacagattacaaaagaatcacctaactatacaatttcataataaattgttacaaattaaaaacatttgacagggtctctgactctgtctattttttttatactgattatgataaaatttatactgttgtgcattgaaaatgtccttaacggcttaattatagatgaagaaaatgaaatacggaggtcgtacgattgaacatcaagaaatgtaaacagctactgatgtcattggttgtgttaactctagctgtcacgtgtctggctccaatgtcaaaagcaaaagcagccagcgatccaattgatatcaatgcatctgctgctattatgatcgaagcttcttcaggtaaaattctttacagtaaaaatgcagataagagactgccaattgcgagtatgacaaaaatgatgacagagtatctgttattagaagcaattgatcaaggtaaagtgaaatgggaccaaacctatacgcctgatgactatgtgtatgaaatttcccaagataacagcttatcaaacgttcctcttcggaaagacgggaaatacacagtaaaagaattatatcaagctacagcaatttattctgcaaatgctgctgctattgcaattgcagaaatcgttgccggttctgaaactaagtttgttgaaaaaatgaatgcaaaagcaaaagaactaggcttaacagattacaaatttgttaacgcaacaggtcttgaaaacaaagatcttcacgggcatcagcctgaggggacaagcgtaaatgaagaaagtgaagtttctgcaaaggatatggcaattcttgcggatcacttgattactgactaccctgagatactggagacttccagtatcgccaaaacgaaattcagagaaggcaccgatgatgaaatggacatgccgaactggaattttatgctgaaggggcttgtcagcgagtataaaaaagcgactgtagacggactgaaaacaggttctactgactctgcgggttcatgctttacaggaacagctgaacgcaacggtatgcgtgtcatcactgttgttttaaacgcgaagggcaaccttcatacaggccgtttcgatgaaacgaaaaaaatgtttgattatgctttcgacaatttctccatgaaagaaatttatgctgaaggcgatcaagtaaaaggccataaaacaatttcagttgataagggtaaagagaaagaagtaggcattgtgacaaacaaggcgttctctcttcctgtcaaaaatggtgaagaaaagaattacaaagcgaaggtcacactgaataaagacaacttaactgctcctgtgaaaaaaggaaccaaggttgggaagctgactgcggaatacacaggtgatgaaaaggattacggattccttaacagcgatctggctggcgtagaccttgttacaaaagaaaatgtagaaaaagcaaactggtttgttttgacaatgcgcagtatcggcggattttttgccggaatttggggaagcattgttgatacggtaaccggctggttttaatcaattgaaagagctctgatggatgttagggctctttcgcgtaatatactgaaaaaacccaatttttaataaaaaatgattttcaaagcgctaaaaaccgaataaaatagtatatatccatatgaattattggatttctaggatacaataaggattagaaatcatataactataccttgattagggggaccaagaaatggctcaaacaggtactgaacgtgtaaaacgcggaatggcagaaatgcaaaaaggcggcgtcatcatggacgtcatcaatgcggaacaagcgaaaatcgctgaagaagctggagctgtcgctgtaatggcgctagaacgtgtgccagcagatattcgcgcggctggaggagttgcccgtatggctgaccctacaatcgtggaagaagtaatgaatgcagtatctatcccggtaatggcaaaagcgcgtatcggacatattgttgaagcgcgtgtgcttgaagctatgggtgttgactatattgatgaaagtgaagttctgacgccggctgacgaagaatttcatttaaataaaaatgaatacacagttccttttgtctgtggctgccgtgatcttggtgaagcaacacgccgtattgcggaaggtgcttctatgcttcgcacaaaaggtgagcctggaacaggtaatattgttgaggctgttcgccatatgcgtaaagttaacgctcaagtgcgcaaagtagttgcgatgagtgaggatgaactaatgacagaagcgaaaaatctaggtgctccttacgagcttcttcttcaaattaaaaaagacggcaagcttcctgtcgttaactttgccgctggcggtgtagcaactccagctgatgctgctctcatgatgcagctcggtgctgacggagtatttgttggttctggtattttcaaatcagacaaccctgctaaatttgcgaaagcaattgtggaagcaacaactcactttactgattacaaattaatcgctgagttgtcaaaagagcttggtactgcaatgaaagggattgaaatctcaaacttacttccagaacagcgtatgcaagaacgcggctggtaagaacataggagcgctgctgacatgttaacaataggtgtactaggacttcaaggagcagttagagagcacatccatgcgattgaagcatgcggcgcggctggtcttgtcgtaaaacgtccggagcagctgaacgaagttgacgggttgattttgccgggcggtgagagcacgacgatgcgccgtttgatcgatacgtatcaattcatggagccgcttcgtgaattcgctgctcagggcaaaccgatgtttggaacatgtgccggattaattatattagcaaaagaaattgccggttcagataatcctcatttaggtcttctgaatgtggttgtagaacgtaattcatttggccggcaggttgacagctttgaagctgatttaacaattaaaggcttggacgagccttttactggggtattcatccgtgctccgcatattttagaagctggtgaaaatgttgaagttctatcggagcataatggtcgtattgtagccgcgaaacaggggcaattccttggctgctcattccatccggagctgacagaagatcaccgagtgacgcagctgtttgttgaaatggttgaggaatataagcaaaaggcacttgtataaaacagttgaaagctgtggaaacttatagtacattataagcacaaataaagatcgaaaagcgttgataggaactagtagggagcctctctttctaagagagccgatggttggtgcgaatcggtgaaagatgctgtctgaatccatccttgagcgaaatgctgaagcgagtaggcatttacgggataaccgttatgtttgaaagtggaaaacgagtctttgatttgttttcaatcagggtggcaacgcgagagctctcgtccctttatggggatgagggctctttttattttcgataaatcaataaaaaaaggagtgtttcgcatgcttgatacgaaaatgctgagagcaaattttcaagaaattaaagcaaagcttgtacacaaaggcgaagacttaactgattttgataagtttgaggcgctggatgatagacgaagagagcttatcggcaaggttgaagagttaaaaggaaaacgaaatgaagtttctcagcaggttgctgtgctgaagcgtgagaaaaaagacgcggatcacattattaaagcaatgcgtgaagtcggcgaggaaattaaaaagctcgatgaagaattacggacagtggaagctgagcttgatacaatcctgctctcaatcccgaatattccgcatgagtctgtacctgtcggtgaaacagaagacgacaacgtagaagtgcgtaaatggggtgaaaagccttcatttgcttatgagccgaagccgcactgggatattgcggatgagctgggtattctggattttgaacgtgctgccaaagtaacaggaagccgtttcgtgttctataaaggcttaggtgctcgtctggagcgtgcgctttataactttatgcttgatctgcatgtggatgagtataactacactgaagtgatcccgccatatatggtaaaccgcgcaagcatgacgggaacggggcagcttcctaaatttgaagaggatgcatttaaaatcagagaagaagattatttcttaattccaacggcggaagtgccgattacaaacatgcatcgcgatgaaatcctttcaggtgacagcctgccgatcaactatgcggcattcagtgcttgcttccgttctgaagctggttcagcaggacgtgacacacgcggattaattcgtcagcaccaatttaataaagttgagcttgtaaagtttgtgaagcctgaagattcttatgaagaattagagaaacttacaaaccaagcagaacgggttcttcagctgcttgagcttccataccgtgtcatgagcatgtgtacgggtgacttaggctttacggctgcgaaaaaatacgatatcgaagtttggattccaagccaagacacatatcgagaaatctcttcttgcagcaacttcgaagcgttccaggcgagacgtgcgaatattcgtttcagacgtgaagctaaaggcaagcctgagcatgtacacacactgaacggttcaggactggcggttggaagaacagttgccgctatcttagaaaattatcagcaggaagacggaagcgttgtgattccgaaagtgctccgtccttatatggggaatagagaagtaatgaaaccgtaaattatggaaaggcgtgcctgacaaggtgcgcctttttgcttatgtaaacacggcattttcataaaaacaaaaaaagtttttaaaaatgcttgaccacacgagaacatacgtgatatagtaagtcttgtcgatacggaggaatacccaagtccggctgaagggatcggtcttgaaaaccgacaggggtgtcaaagcccgcgggggttcgaatccctcttcctccgccatattgattttaattctaatgaaacacaagcatatattggagattgttttgtccgttgcattcggtgcggcggattttttattttaaagaaaaagtgaatctcgactgagattcactttttttgattatcatgaataactgaagcaatttgatctacaatattttcaatcgagttttcgtcgttcagaagatcataatcttcaatgcgaagttttaaaacagggcaggcattaaaaccgcttatccagttctcgtagcgtgtatgcatttcttcccaataagacctgcttgtctgaagctccatctcacggccgcgttgttcaatccggtttaaaatgttctccagatctccttctaaatagatcagcacatctgggtgtgggaaatacggtgtcattaccattgcttcgaaaaggcttgtgtaagtcttataatcaacctttgacattgtccctttatcagcatgcatttttgcgaaaattcctgtatcttcataaatcgaacgatcctgtacaaaacctccgccggcttcaaaaattgttttctgttctttgaagcgttcagctaagaagtaaatttgaaggtgaaagctccaacgttcaaaatcatgatagaacttttccaagtatggattatgatcgacttcctccaaagatgttttaaatccaagccgtttagctaaagtttttgttaaagtcgattttccgacacctactgttcctgctactgtaataattgaattcttagggatatgatgttccttcatacgataagctcctttacatgggcggcaatgcgttcaaagtcgctcttattcaaaacgaaatcctttgaatcaccatctacggttaacactgtaagttcagggtctgcttcctgcagctgcttgatggcgacttcataatctgaaatcagctgctccaaatagctagtttcaatttttttctcaaaggggcgcccgcgtttttcaatgcggtgtagcaatgtaggcagactggcctttatgtaaatgatgaaattcggctttggcagatcatccgttagcaggtgatatatctttttgtatttttccagctgatgtggagacaaggtgcgttccgcaaaaatcacatttttataaatatgataatcagctattacaggctgtcccttttttaaaaagtgatcactggtgtcttcaagctgtttgtatctgtgacaaagaaaaaacatctcgagctggaagctccattcctctatattgtcataaaacttatcaaggtacgggttatcctctacaatctcattgatcatagggaatccgaattcttgtgagagcatcgttgcgagagttgtttttcctgccccgataggaccttctattgcaataaaaggggctgtattcatcggaatcctccttatatctgaaaaacgtgcgtcagttaccgaccttcatattgtatcacaacccttgggtgcccccatgaaaaaagacgtttccaaattatcgaaacgtctttttgacaacattaaattgatcagacagcagcagccagttttgtggaaaggaaagacccagcttccaatagctgatgcctcttaaattcagctctttaatcagattaaattttgcttgaatcgagcgggcatcctcgaaccatacctcgtgccttctgttttctgcatcagtatagcggaagaaaggagcttgagcggtttggtcatactgaatggaagcattgttctgatcagctatgacaatggcttgctgagggcttactgctcttgctggagttccccctgctgtatatggcagcgtccagtcatatccatataaattctggcccatgacaattttgttcgcaggcatttcagtcaaagcatattctatgacatcacggacaggtccaattggagaaaccgcttgaggcggcccgccgctatagccccattcatatgtcatgagaacaacaaagtcgacaatttggccatgcgccctgtaatcatgagcttcataccatctgccctgctgtgttgcacttgttttaggagcaagtgccgtagaaatttctaagccctctcgatgaaaaagatcccttgcttcgcggagaaattgattataggcctctctatcctggggccgcaaatattcaaagtcgaaatgaatgtcacggaagccatatctcttggcattctccactatttcatttagaagccttctttttacagtttcgtcgttcaaaaggatccggccaagttcatcactaaatgcctggttttctaggttcgttataatcatcatcaatgttgtattttgactttctgtaatgctccttaaattcgttaaaggcggtgcgactaaggttccgttccgctgtgcctggaagctgaatgcgccaaggtacgttaagtagggcgacgcttctctggccgcctgctggagattttcgctgacttgatttcctcggggctccaaataagcatttgattcgatgtctcgtttaggggctggtgggatgtatatacggaaaccaatctgaagcacggtatttaactggatgcggttaacccttgcgagctcggctgctgttgtattgaactgccgggcgatggatgtcagggtatcacctcgcttcacatcatagaactggccggctattggaatgacaatggtttgtccgacaacaaggctgtcgggattcggtatttcattcgtttcagtgatctcatttgcggttgttctgtattgtgaagcgatagcagaaagagtgtcgccttgttttaccacataaatttgaatgaaaaacgcctcctttcatatcgctatcaatgtatgaaagaaaagcgctgatcatgtttatttttctgtaatttgttcttccgtcgtaatttctgcgaaaagaacattctccatcatagttaaggcgaattcgttatcttcgtcactgtttgacgcgatacagtccttaggaatcgtgatgctgtattccctcatataagcgtcattagcggtaaacagcacacatatattgccggctatacctgttaagataatatgtctcacctgcaactcagtaagaagggtgtgaagtgcagtttcgtagaaagcggaatgttttggtttgattaaaaaataatcagcatcttccggggctatcttagtgatgatatccttgcttctttcatttgtgcattcttgctgaatgtttttaatgtcagcttgccaaagtccataatgatcattgatgtaaataatcggccattcattttgtctcgcgtgctcctttaatgataaaatatgaggaacgattttttctgtttttttagcgagggtttctcccatatcgaattcaaaattattgatcatgtctacaatgagaagggctgtatctgctttggacaatcgacagtctcctttccgtttcagttatagttaatatgtagcctttttaggcaatgaaaaaactttgaaaagagagcttatccttatgacacaagatgaactttatatgaaagaagcaattaaagaagcgaaaaaggctgaagagaaaggtgaagtgccaataggtgcggtgcttgtcgttaatgatgaaattatagcgcgtgcacataatttaagagagactgagcaacgatctattgcccatgcagaaatgcttgtgattgatgaagcgtgtaaggcactgggaacatggcggctggaaggtgcgactctttatgtgacgcttgagccttgtccaatgtgtgctggtgcagtcgtactttctcgagtggaaaaagtggtttttggcgcatttgatccgaaaggcggctgttcaggcacgctaatgaaccttctccaggaggaacgctttaatcatcaggctgaagtggtgagcggtgtacttgaggaagaatgcggcggaatgctcagtgcgtttttcagagaactaagaaaaaagaagaaagctgccaggaaaaacttgtctgaatagtacggttgcaatttttaggggaaacagatatacttaagtgtgcatcgtaatagatgcaacataaaatttgatatttattttgccgtgctaagcggggaggtagcggtgccctgtacctgcaatccgctctagcagggccgaatcccttctcgaggttcgtttactttaaggcctgccttaagtaagtggtgttgacgtttgggtcctgcgcaatgggaattcatgaaccatgtcaggtccggaaggaagcagcattaagtgaaacctctcatgtgccgcagggttgcctgggccgagctaactgcttaagtaacgcttagggtagcgaatcgacagaaggtgcacggtaaatcaatcatcaaattttcagactcacctaatattaggtgagttttttgttatgtaaaaagagcttttggaatcgaaacaaggttcatgtataatgggaatgatgaataacggaggagggcaaacccgtgagttaccaagctttatatcgagtattcaggcctcagcgctttgaagatgtggtcggacaagaacacattacaaaaacgctgcaaaatgcccttttgcaaaaaaagttttctcacgcctatctgttttccgggccaagaggaaccggaaaaaccagtgcagccaaaatatttgctaaggctgtcaactgtgaacatgctcctgttgatgagccatgcaacgaatgtgcggcctgtaaagggataacaaacgggtcaatatccgatgtcatagaaattgacgccgcttctaataacggtgttgatgagattcgtgacattcgcgataaagtgaagtttgccccgtcggccgtcacatataaggtatatatcatagatgaggtgcatatgctttctatcggcgcttttaatgcattactaaaaacattagaagagccgcctgagcattgtattttcatattagcaacaactgaaccacacaaaattcctttaaccattatctctagatgtcagcgttttgactttaaacgaattacctcccaggcgattgtaggccgcatgaataaaattgttgatgctgaacagctgcaagtggaggaaggatcgctggatatcatcgcgagtgctgcagacggagggatgagggatgccctgagccttcttgatcaggccatatcattcagcggcgatatcctgaaagtcgaagatgcgcttttaattacgggtgctgtttctcaattatatatcgggaagcttgcacaatccctgcatgataaaaacgtttctgacgcactggaaacattaaatgaattgcttcagcaaggaaaagatccagctaagctgatagaagatatgattttctatttcagggacatgctgctgtacaaaacagcccctggcttagagggagttcttgagaaagtaaaagttgatgaaacgttccgggaactaagtgaacaaattccggctcaggccctatatgaaatgattgatattctgaacaagagccatcaggaaatgaaatggacaaatcatccgcgtatctttttcgaagtggccgttgtgaagatttgccaaacctcacatcaatctgctgctgatctcccggaagtggatatgctgatgaaaaaaatccagcagctcgaacaggaagtagagcggctcaaaacaacgggcataaaagcagctgcggaaagcccgaaaaaagaagcgccgcgtgtgccaaagggcgggaaatccaattacaaagcgccagtaggcagaattcatgagattttgaaggaagccacaagaccggatcttgatctgctcagaaacagttggggcaagcttcttgctcatctcaaacagcaaaacaaagtatcacatgccgctttactgaatgacagtgaacctgtggctgccggatcggcggcatttgttctgaaattcaaatatgaaattcattgtaaaatggtcgctgaggataacaacggagtccggactaatcttgagcagattttagaatcgatgctcggaaaaagaatggatttgattggcgttccagaagcacaatggggtaaaataagagaagaatttttagaagatcatcagcaggaaaatgaaggatcaaatgaaccggctgaagaagacccgcttattgccgaagcgaaaaagcttgttggagcggatttaattgaaataaaagactaacaaaatgaaagagagtgaatgctatgcgtggcggaatgggtaatatgcaaaaaatgatgaaacaaatgcaaaaaatgcaaaaggacatggcgaaggctcaagaagagcttgcagaaaaggttgttgaaggaactgcaggcggcggtatggtaacagtaaaagcaaacggccaaaaagaaatcctggatgttatcatcaaagaagaagtcgttgatcctgaagatattgatatgcttcaagatttagtgcttgctgcaacgaatgaagctttgaaaaaagttgacgaaatcacaaacgaaacaatgggtcaatttacaaagggaatgaacatgccaggtttattctagggggataaaagaacatgcaatatcctgaaccaatatcaaagctgattgacagctttatgaaattgccagggatcggaccgaaaacagcggttcgtctggctttttttgttctaggtatgaaagaagatgtagtattagattttgcgaaagcattagtaaatgcgaaacgcaacctgacatattgttcagtttgcgggcatattacagatcaggacccttgctatatatgtgaagatacgcgcagggataagtctgttatctgtgttgtgcaagaccctaaggatgttatcgctatggagaaaatgaaggaatacaacggacagtatcacgttcttcacggcgctatttctccaatggacggcatcggaccggaggatattaaaataccagaattgttaaaacgattacaggatgatcaagtgacagaagtgatcctcgcgacaaaccctaatatagaaggggaagcaacggcgatgtatatatcaaggctcctcaagccgtctggtattaagctctcccgtattgcccacggactgcccgtcggcggtgacttggaatatgctgacgaggtcactctttctaaagcacttgaaggaagacgtgaattgtaaggaggaaaaagcgatccatgggttttcttcgcaagaaaacattaagaagagagtttgatgaaaaactaaccgagcagctttttaagcaaaaggaagagtggaacaggcaaaaaaagctggtcgaaaaaagcttagaaccgtctgctgaagtgttatacgaactgaaagtagctgaagcgaagtattttttttacttaagggaagcgaagcagcgaaatttaaaaatcagccggtggaagtaagtggtctaaactcctggatcttctcataagcttgtactagaacaagcgaaggagatgagaagattcatggagcctatttttattattgggattattttaggactggttattcttctttttttatcaggttcaactgcgaagcctttaaagtggatgggcatcacagctgttaaatttgtggcaggtgctttgctgctggtttgtgtaaatatgtttggcggcagtcttggcattcatgtgccgattaatctggttacaacagctatcagcggaattttagggatacccggaatagctgcgttagtcgttattaagcaatttatcatttaattgatattatgtattgacttagacaactgaaggtgttattctaatatacgtcgctgatgacgaacagcttttttgaaaaggaaatgctaaaaagttgttgacagtagcggcggtaaatgttatgataataaagtcgcttaaacgagcggtaaacaaagttctttgaaaactaaacaagacaaaatgtacctgttaattcatttttataaatcgcacagcgatgtgcgtagtcagtcaaactactttatcggagagtttgatcctggctcaggacgaacgctggcggcgtgcctaatacatgcaagtcgagcggacagatgggagcttgctccctgatgttagcggcggacgggtgagtaacacgtgggtaacctgcctgtaagactgggataactccgggaaaccggggctaataccggatggttgtttgaaccgcatggttcaaacataaaaggtggcttcggctaccacttacagatggacccgcggcgcattagctagttggtgaggtaacggctcaccaaggcaacgatgcgtagccgacctgagagggtgatcggccacactgggactgagacacggcccagactcctacgggaggcagcagtagggaatcttccgcaatggacgaaagtctgacggagcaacgccgcgtgagtgatgaaggttttcggatcgtaaagctctgttgttagggaagaacaagtaccgttcgaatagggcggtaccttgacggtacctaaccagaaagccacggctaactacgtgccagcagccgcggtaatacgtaggtggcaagcgttgtccggaattattgggcgtaaagggctcgcaggcggtttcttaagtctgatgtgaaagcccccggctcaaccggggagggtcattggaaactggggaacttgagtgcagaagaggagagtggaattccacgtgtagcggtgaaatgcgtagagatgtggaggaacaccagtggcgaaggcgactctctggtctgtaactgacgctgaggagcgaaagcgtggggagcgaacaggattagataccctggtagtccacgccgtaaacgatgagtgctaagtgttagggggtttccgccccttagtgctgcagctaacgcattaagcactccgcctggggagtacggtcgcaagactgaaactcaaaggaattgacgggggcccgcacaagcggtggagcatgtggtttaattcgaagcaacgcgaagaaccttaccaggtcttgacatcctctgacaatcctagagataggacgtccccttcgggggcagagtgacaggtggtgcatggttgtcgtcagctcgtgtcgtgagatgttgggttaagtcccgcaacgagcgcaacccttgatcttagttgccagcattcagttgggcactctaaggtgactgccggtgacaaaccggaggaaggtggggatgacgtcaaatcatcatgccccttatgacctgggctacacacgtgctacaatggacagaacaaagggcagcgaaaccgcgaggttaagccaatcccacaaatctgttctcagttcggatcgcagtctgcaactcgactgcgtgaagctggaatcgctagtaatcgcggatcagcatgccgcggtgaatacgttcccgggccttgtacacaccgcccgtcacaccacgagagtttgtaacacccgaagtcggtgaggtaaccttttaggagccagccgccgaaggtgggacagatgattggggtgaagtcgtaacaaggtagccgtatcggaaggtgcggctggatcacctcctttctaaggatattatacggaatataagaccttggctcttataaacagaacgttccctgtcttgtttagttttgaaggaactttgttccttgaataagttaagatgggcctgtagctcagctggttagagcgcacgcctgataagcgtgaggtcggtggttcgagtccactcaggcccaccatcttatataacggggccttagctcagctgggagagcgcctgctttgcacgcaggaggtcagcggttcgatcccgctaggctccaccaacgtgttctttgaaaactagataacagtagacatcacattcaattagtaacacaagatatcacatagtgattctttttaacggttaagttagaaagggcgcacggtggatgccttggcactaggagccgatgaaggacgggacgaacaccgatatgcttcggggagctgtaagcaagctttgatccggagatttccgaatggggaaacccaccactcgtaatggagtggtatccatatctgaattcataggatatgagaaggcagacccggggaactgaaacatctaagtacccggaggaagagaaagcaaatgcgattccctgagtagcggcgagcgaaacgggattagcccaaaccaagaggcttgcctcttggggttgtaggacactctatacggagttacaaaagaacgaggtagatgaagaggtctggaaaggcccgccataggaggtaacagccctgtagtcaaaacttcgttctctcctgagtggatcctgagtacggcggaacacgtgaaattccgtcggaatccgggaggaccatctcccaaggctaaatactccctagtgaccgatagtgaaccagtaccgtgagggaaaggtgaaaagcaccccggaaggggagtgaaagagatcctgaaaccgtgtgcctacaagtagtcagagcccgttaacgggtgatggcgtgccttttgtagaatgaaccggcgagttacgatcccgtgcaaggttaagcagaagatgcggagccgcagcgaaagcgagtctgaatagggcgcatgagtacgtggtcgtagacccgaaaccaggtgatctacccatgtccagggtgaagttcaggtaacactgaatggaggcccgaacccacgcacgttgaaaagtgcggggatgaggtgtgggtaggggtgaaatgccaatcgaacctggagatagctggttctctccgaaatagctttagggctagcctcaaggtaagagtcttggaggtagagcactgattggactaggggcccctaccgggttaccgaattcagtcaaactccgaatgccaatgacttatccttgggagtcagactgcgagtgataagatccgtagtcgaaagggaaacagcccagaccgccagctaaggtcccaaagtatacgttaagtggaaaaggatgtggagttgcttagacaaccaggatgttggcttagaagcagccaccatttaaagagtgcgtaatagctcactggtcgagtgactctgcgccgaaaatgtaccggggctaaacgtatcaccgaagctgcggactgttcttcgaacagtggtaggagagcgttctaagggctgtgaagccagaccggaaggactggtggagcgcttagaagtgagaatgccggtatgagtagcgaaagaggggtgagaatcccctccaccgaatgcctaaggtttcctgaggaaggctcgtccgctcagggttagtcgggacctaagccgaggccgaaaggcgtaggcgatggacaacaggttgatattcctgtaccacctcctcaccatttgagcaatggggggacgcaggaggatagggtaagcgcggtattggatatccgcgtccaagcagttaggctgggaaataggcaaatccgtttcccataaggctgagctgtgatggcgagcgaaatatagtagcgaagttcctgattccacactgccaagaaaagcctctagcgaggtgagaggtgcccgtaccgcaaaccgacacaggtaggcgaggagagaatcctaaggtgatcgagagaactctcgttaaggaactcggcaaaatgaccccgtaacttcgggagaaggggtgctctgttagggtgcaagcccgagagagccgcagtgaataggcccaggcgactgtttagcaaaaacacaggtctctgcgaagccgtaaggcgaagtataggggctgacgcctgcccggtgctggaaggttaagaggagcgcttagcgtaagcgaaggtgcgaattgaagccccagtaaacggcggccgtaactataacggtcctaaggtagcgaaattccttgtcgggtaagttccgacccgcacgaaaggcgcaacgatctgggcactgtctcaacgagagactcggtgaaattatagtacctgtgaagatgcaggttacccgcgacaggacggaaagaccccgtggagctttactgcagcctgatattgaatgttggtacagcttgtacaggataggtaggagccttggaaaccggagcgccagcttcggtggaggcatcggtgggatactaccctggctgtattgaccttctaacccgccgcccttatcgggcggggagacagtgtcaggtgggcagtttgactggggcggtcgcctcctaaaaggtaacggaggcgcccaaaggttccctcagaatggttggaaatcattcgcagagtgtaaaggcacaagggagcttgactgcgagacctacaagtcgagcagggacgaaagtcgggcttagtgatccggtggttccgcatggaagggccatcgctcaacggataaaagctaccccggggataacaggcttatctcccccaagagtccacatcgacggggaggtttggcacctcgatgtcggctcatcgcatcctggggctgtagtcggtcccaagggttgggctgttcgcccattaaagcggtacgcgagctgggttcagaacgtcgtgagacagttcggtccctatccgtcgcgggcgcaggaaatttgagaggagctgtccttagtacgagaggaccgggatggacgcaccgctggtgtaccagttgttctgccaagggcatcgctgggtagctatgtgcggacgggataagtgctgaaagcatctaagcatgaagcccccctcaagatgagatttcccattccgcaaggaagtaagatccctgaaagatgatcaggttgataggtctgaggtggaagtgtggcgacacatggagctgacagatactaatcgatcgaggacttaaccacattttgaatgatgtcacacctgttatctagttttgagagaacactctcaatttgtttggtggcgatagcgaagaggtcacacccgttcccataccgaacacggaagttaagctcttcagcgccgatggtagtcgggggtttccccctgtgagagtaggacgccgccaagcaagtttaaacccagctcattgagctgggttttttgtttacttaagatcgagaaaatcaaacaaatacaaacaccgagggcttatatagcccatatactgatttaaagtttcaaaaaggtctaaatagtgtatacaatatccgttttaaggggaggctaactgtacggaggtggagaagatggacgaaacagttaaacttaatcatacatgtgtgatttgtgatcaagagaagaatagaggcattcatctttatacgaaattcatatgcttagattgtgagagaaaagtaatttctacatcaacttctgatcctgactatgcgttttacgtaaaaaaactaaagagcattcatacaccgccattatattcatagacctgaaaaggtctttttttgtactcttaataataaaaagaagatgaaacttgtttaaggattgaacgtagtagataataatattaaaactgagtatagacacaggagtcgattatctcatgcagagattttttcactttttgatgtggagtttaactagcagtgcgacttttgttttcattggaatattgagcttttttggtttaaaccagtcgctttttttatctattgtttatgggcttgcttctggagcagccgtatatatagctggcatctggaatgcaagacggttatttcttaaaaagcatgaattgacaggaagagagtatgcttacattaagaaaaacttagaggaagcaaggcagaaaatgatccgtcttaggaaagccttgtttcaggctaaaagcattcaaatgtttaagcaaaatgcagaaatgctaaggattgtgagaaggatttatctcctcaccaaaaaagagccaaagcggttttatcaggcagaacgatttttttatcaaactctcgattcggttgttgaattaacagagaagtatgcttttctatcatctcaccccaaaaaaagcaaagaactttcgatgtcgttaagtgagacacgcatcactcttactaaattgaccaagcgtttagaggaagatttaactcaagtaatgggtgatgaaattgacgagttgcactttgaattagacgcagcaaaacattcattaaagaaataagggaagagggtaagagcgatgaaccgagaccaaagcgaccttcatatagatgaattattggcagatccttttggtggtaacatagagataccaggttcggaggctgtaaaagcagagaaagagcaagtacggcttgttgatgttcttcctgaggaaaacaagaaaaaagcaattcagcttgctggacagattgatcataaaaatatgcaaagcattgtcttatacggttcacaagctcaatctaaactgctgaacttttctcatgatatgattaatcatgttcaaaagaaggatgtcggggaaattggcgaaatacttggagagctgatgaaaaagctggagcaagtaaatcctgatgatctccaatctaagaaaaagggttttttggcacgcatgtttggaagagtatcaagttctcttcaagaggtgctgtctaaataccaaaagaccagtgtgcagatagacaaaatcagcttgaagctggagcactctaaaaatgctttaattagtgacaacaagctgttagagcagttatatgaaaaaaataaagaatattttgccgcgctgaatgtttatattgctgcaggagaactgaagctggaggaattaaaaacaaaaacgattcctgaactgaagcaacaggctgaatcgagtgatcataaccaaatggccgttcaagaggtgaatgatttaattcaatttgctgaccggttagataaaagggtgcatgatttgctgctgagcaggcaaattacaatccaaagtgcaccgcaaatcaggctgattcaaaacacaaaccaagcgttagcagaaaagattcagtcatccattgtgacagcgattccgctatggaaaaatcaagttgccattgcactgacgcttttaaggcagcgcaatgcagtggatgcacaacagaaagtatctgatacaaccaatgagcttttgctgaaaaatgcggagcttttaaaaaccaatacaattgaaactgtacgagcaaatgaacgaggccttgttgatatagataccttaaaaaaggtgcaggaaagcttaataagcacgcttgaagaaacactgactatacaagaagaaggacgaatcaaacgccgtcaggcagaagaagagctgatgatgatggaaggcgacctaaagcaaaagctgcttacaataaaggaaagatagttaccagtaagtctggctttaagttctgtcagaggcacgatataataaggtgtaagaagacacattcaaaggattgttttcatgaacacacctttatataaagcattaattcaacatgcgagaagaaattctcattcatttcatgttccgggacatcacaatggagatgtcttttttgatgacgctaagtcaatattcaatccgcttctcaccattgatgtaactgaactggcaggactggatgatctccatcatccttctggggtgattaaggaagctcaggagcttgccagtcaattatatggatcggcggaaagtttttttctggtaaatggtacgactgtcggaaacttagcgatgattttatctgtttgtgaacctggtgatacaattctggttcaaagaaactgtcataaatctgtatttcatgctgttgatttgtccggtgctgagccggtttatcttgcacctgacgttgattcagcgatgcatgtgcctacgcatgttccgcttggaacaattaaagaggccctggaagcatatccagatgcgaaaggcttggtactgaccaatccgacatattacggacatagtgctgatttgactgagatcattactgaagcccatcattacgggattcctgttttggtcgatgaagcgcatggcgcacattttattttaggtgagccttttccggtctcagctttaaaaatgggggcagatattgttgttcagtcggcccacaaaacgttgcctgccatgacgatgggttcttatttgcatctcaacagcagctgcaggattaacagggatcgggtggcagagtatttaaaccgattacaaagcagcagcccgtcttatccgattatggcttcgttagatattgcccgcgcttatgtacagcatattatagaagaacaaaagctttctgacattctgcagcggatagaaacacttaaacaaacgtttgattcacttacaaatgcagaagctgttaaccctgctaatccactgatcatcacggatccgctaaagctcacaattcgttcaaaacgcggacattctggctatacgctgcaaagcatattagagcgtgccaacatattcactgagcttgctgatgaaaatcaagtactgctcgttctcccattgggaggaaaacggagaataaatgctgaaaccattagaagcattgatgaagagattgagaaaacgcctccggatcaggcgtttgtttctgcagaatggggagtgcagcctgttactgtcttgccttatccaaaaaaggtcttacattcgtttaagaaagaatatgtggactttgaggaagcagctggccggctgaatgcagaagatatcatcccttatcctccgggtatcccgatgattatggcgggagaaagaataacaaaagaaagtgtgcaaaagctcagccgcttgatcagcatgaaaacgcatgttcaagggaatatgaaaatcaaagagaaacaactacttgtttatatagaagaggagaaatcatgagcggtttatttattacattcgaaggtcctgaaggtgcagggaaaacgactgttctgcaggagatcaaaaacatactgacagcagaaggccttcaggttatggcaactcgagagccaggcggaatagatattgcagaacaaattcgagaggttattctgaatgagaacaatatattaatggacccaaaaacagaagctctcttatatgcggctgcaagacgccagcatttagttgaaaaagtaaaacctgctttagaacagggggttatcgttctttgcgacagattcatagacagttctcttgcgtatcaaggatatgcaagagggcttggaattgatgaggttctgtccattaatgaatttgccattggagatatgatgccccatgtaacggtttatttttcaattgatccggaagaaggactgaagcgtatttacgcaaacggctcacgggagaaaaacaggctcgatttagaaaaactggactttcatacaaaagtacaagaaggttatcaagagctgatgaagcgatttccggaaagatttcattcagttgatgccgggcaatccaaagacctcgtcgttcaggatgttctaaaggtgatcgatgaagcgttgaaaaaaattcaattgtgacctgtttcccaatagttgatataataatgtaaacgagatcacgttgtttccaatctaaaggaggccttcacagatgaaattgatagtggcagttgtacaagatcaggacagcaacagacttttgaaaaccttaacggatcacaacttcagagtcacaaagcttgcgacgacaggaggatttcttaaatcaggcaatacaacgtttatgatcggtgtcgaggatatacgcgtcaataaagcgttgagtctcattaaagaaaacgggcagaaacgtgatcagatgattgcccctgtatctccaatgggtggaaatgctgattcctatgtcccttatccagtcgaagttgaagttggcggagcgacagtatttgtccttccagtcgatgaatttcatcaattttaaggatctgaaactgtgaaaattaataaagatatacgtacatttatagataataagcagattccctctgtgaaaacatctgagatcacggcatcgtttaaaacatcaatggaaaaccaaagcagcaaaatgaagcttgatcagcttaccaggttgttatctgatatagaagcattcggaaaaaggctaacgaaatctcggaattttaaagacttagcgagatttaaaggacttgtgaaacgttttgtcaaggaagctgtggacagcggcctttcacatgaaacatcgaaaagctttgacctttacgggaacagcagaacgctgggacttgtgaaagaaatagatgacaaattgatacagcttacggaagagatgatggatcaggaaaaaccggcaattgatttgctggagcgtattggcgaaataaaaggtttattaattaacctttacacatagagagtgatacaatggcaatatcctggaaggaaatgaacgagcttcagcccagagtgatgaagcttttatataatagtattgagaaggacagactatcacacgcttatttgtttgagggaaaaaaaggaacaggcaagcttgatgccgcgctgcttcttgcaaaaagcttcttttgtctggaggatggcgcggagccttgtgagagctgccgaaactgtaaacggatagagtcagggaaccatcctgatctccatcttgttcagcctgatggcttatcaatcaaaaaggcgcaaattcaagcgctccaagaagagttttctaagacaggacttgaatcgcataaaaagctgtatattatttcgcacgcagatcaaatgacagcaaatgcggcgaacagcctgctgaaatttttagaagaacctaacaaagacacaatggccgtcctcatcactgagcagccccaaaggttattggataccatcatttcaagatgccaaacccttccttttcagcctttgcagccgaaagcaattgaagatagactgatcgaacaggacgtctcgcctcatatggcaaggcttctagccaacatgaccaataatgtagcagaagcagtcgaattaagtcgaaatgatgagtttgcagagtctagagcgaaagtgataaaattgtatgaagtcctacaccagcggaaaggacatgcttttttctttattcaagatcaatggatgccctttttcaaagaaaaaacccatcaagaaatgggtcttgatatgctcttattgatatatcgtgatgtgttgtccatccaaataggaaatgaagataaattgatttatcaagacttattccaatcaataaaacagcatgcgctacaatcaacacaacaaagcgttacgaatcagatacttgctgttttagaagcaaagaaacggcttcattccaatgtgaatgtacaaggattaatggagcacttggtgttaatgttgcaggagggataagcttgtacaatgtaattggtgtccgctttaagaaagcgggtaaaatatattattttgatccgaatggatttcatatagaacatgacagctgcgtaattgtagaaactgtcagaggcgttgagtacggccaggtcgtaattgcaaataaacaggtggatgagcatgatgtggtgcttccccttcgaaaagtgatacgtgtggctgacgagcgcgatcttctcattgtagaagaaaataaacaggaagcactatcagcatttgatatctgccaaaagaaagtgattgagcatggcttggatatgaagctggtcgatgttgaattcacgtttgatcgcaataaagtcattttttacttcactgctgacggccgagtcgactttagagagcttgtaaaggatttggcttctatctttaagacaagaattgagctgcgccaaatcggagtgagggatgaggcaaaaatgctcgggggaatcggtccttgcggaagaatgctttgctgttcaacgtttcttggagattttgaacctgtttccattaaaatggccaaggatcagaacttgtctttaaatcctacgaagatttcgggtctttgcggacgattgatgtgctgtctaaaatatgagaacgatgagtatgagacggcaaaagaacagcttccggatataggagaaatgattacgacagcaaacggtcccgcgaaggtcgtcggactaaatattctggaacgggtgcttcaggtggaactgataaaccgtgaaaaagtgatagaatatacttgggaagagctcttggaagagggcgtcgtatccgcacaaaccacagattaacgaggtgtggaaccttggataaaaaagagttatttgatacagtcattaacttagaagaacaaattggctcactgtacaggcagctgggggatttgaagcagcatatcggtgagatgattgaggaaaatcatcatttacagcttgaaaacaagcatttgcgcaaacggctggacgatacgacgcagcagattgaaaagttcaaagctgataaaaaagaatcaaaaacacagaagacagagcaaactgatataggggaaggatatgataatctggcacgtctgtatcaagaaggatttcatatctgcaatgtccactatggtagtgttcgaaaagaagattgtcttttctgtctgtcattcttaaataaaaaatagggaaaaggcttccgcataagacgggagcctttttcaaaggtactgaaaggataagaagatggtttcattacatgatgatgaaagattagattatttgctggcagaggacatgaaaatcatacaaagcccaacagtgtttgctttttcgttggacgctgtgcttctgtccaaatttgcgtacgttccgattcaaaaagggaaaatcgttgatttatgcaccggcaatggtattgtgccgctgctgctcagtacaagatcaaaagcagacattctgggagtcgaaatacaagaaaggctgcatgatatggctgttcgcagcgtggagtataataagttggacgatcagattcagatcatacatgatgacctgaaaaacatgccggagaaacttggacataatcgatatgatgttgtcacctgcaatccgccgtattttaaaacaccgaaacaaactgaacaaaacatgaatgagcatctccgaatcgcaagacatgaaatccactgcacactggaggatgtcatttcagtcagcagcaagctgctcaagcaagggggaaaagcagctcttgttcaccggccgggaaggcttctggagatttttgaactgatgaaggcttatcaaatcgagccaaaacgtgtacaatttgtctatccgaagcaagggaaagaagccaataccattttggttgaaggtatcaaaggcgggcgcccggatttaaaaattcttcctcccttattcgtttatgatgaacaaaatgaatatacaaaagaaatcaggaccattttatatggagacaaataaccatttcttctacgtcgtgaaatgtaaggacaatagctggtatgccggatataccaacgatctgcataaacgagtgaaaacgcacaatgatggaaagggcgcaaagtacacaaaagtaagacgtccggttgaattaatttttgccgagagcttttcaacaaagcgggaagctatgcaggcggaatattatttcaaaaaactaactcggaagaaaaaagagctttatatagaagaaaagcggaacagcaaggaggctgtatatgttaaggcgccaaatgagctttaatggaaagtcggacatggggattctttacttggtcccaaccccaatcggaaatctagaggatatgacattccgggcgatcgacacgctgaaatcggtggatgcgattgctgcggaagatacgaggcaaacgaaaaagctttgtcatgtatatgaaattgaaacaccgctcgtcagctatcacgaacacaataaagaaagcagtgggcacaaaattattgaatggctgaagtcgggaaaaaacattgctcttgtcagtgatgccggtctgccgacgatttctgatcccggagcggaaattgtaaaggattttacggatataggcggttatgttgttccgttgccgggagcaaatgccgcattaacagctcttattgcttcaggtattgtaccgcagccttttttcttttacggttttctcaacagacagaaaaaagaaaagaagaaggagcttgaagcccttaaaaaacggcgggaaacgatcattttttatgaagcgcctcacagattgaaggaaaccttgtcagcgatggcagagatattaggagatcgggaaattgctgtaacgcgtgaactcactaagaaatatgaagagtttatccgaggaaccatatctgaggtcattggatgggcaaacgaagatcagatacgcggcgagttttgtcttgtcgtagaaggaagtaataatgaagaggtagatgaggaagaacaatggtgggaaaccctcactgcgaaagaacatgtcgagcattacatctcgaaaggcgctacgtctaaagaagccattaaaaaagcagcagtcgatcgcaatgtaccaaagcgtgaagtgtacgatgcttaccatattaagcaataaaaaaacgttcttgtgtcataacaagaacgttttttgtacaagaaatgattatttaaggttttgaagctggttttggatttcgctgatgatttgctcagcgccttctttactaagaaccaatttaccgcctgcaagtttaaggttatcatcagaaacttcaccagttacttggcaagtcatgtttggtttatattttttaaggatgattttttcatcatcaacatagatttcaagagcatctttttctgcgattccaagagtacgacgcagttcgataggaataactacacgtcctaattcatcaactttacgtacaataccagtagatttcataaacattctcctcccaagagatacttatttgtttaaattatatttttcttcgtcattattcgacaaaatccttaccttcatagcataacaaggtttccaataatcgtcaatcattttgtttactattgattgtaagaattagttcttatagtcagtaatgtcttagaaactaccgaaataacagcattttataaatatttaataaagctattatcctactaaaaatccttttaaatcaagactttcgaaccaaagttttttatttcatttgattatatacgacaaaattcgacacgaacagactttttttattttcattaaagatttttaattttaattattctttttcagggcgtatgtatatattcttgatcttaaaggctaagatggtatcatagataaaggataaatataaataatattcatatatgatttgcacttatcgccgctctcgtcctttgggcgggagctttttgacattctgattaggaggtttcaagatgccgcaagaaaacaatacattttacattacaacaccgatttattatccgagcggaaaattacatatcggccatgcatatacgacagtcgcgggagatgcaatggcacgttacaaaagattaaaagggttcgatgttcgctatttaacgggaacggacgagcatggacaaaagatccagcaaaaagctgaacaggaaaacattacacctcaggagtatgtggatcgcgcagcggcagatattcaaaaactgtggaagcagcttgaaatctcaaacgacgactttatccgcacgacagaaaaacggcataaagttgtcattgaaaaggtgtttcaaaagcttcttgataacggggacatctatcttgatgagtatgaaggctggtacagcatccctgatgaaacgttctacacggaaactcagctcgttgatattgagcggaatgaaaagggagaggtcatcggcgggaaaagccctgacagcggtcacccagttgaattgatcaaagaggaatcttatttcttccgcatggggaaatacgcggatcgtcttctgaaatactatgaagaaaacccgacattcattcagccagaatcacgcaaaaacgaaatgattaataactttatcaaacctggacttgaggatttggcagtatcacgtaccacttttgattggggcgtgaaggtgccggaaaatccaaagcatgttgtatatgtttggattgacgcactatttaactatttaacggcactcggttatgatacagaaaatgatgagctttatcaaaaatattggcctgccgatgttcatttagtcggtaaggagattgtacgattccatactatttactggccaattatgctgatggcgctggatcttccgctgccaaagcaagtattcgcgcatggctggcttttgatgaaagacggaaaaatgtcgaaatcaaaaggaaacgttgtagatccggttacattaattgagcgctatggtttagacgagcttcgctattacctgcttcgcgaagtgccgttcggatctgacggagtattcacgccggaaggatttgttgagcggattaactatgatttagcaaatgatttaggaaatctattgaatcgtactgttgcgatgattaataagtattttgacggacaaatcggttcttacaaaggtgctgttacggaatttgaccatacgctaacttctgttgctgaagaaacagtaaaagcttatgagaaagcaatggaaaatatggagttctcggtagcactttcgactttatggcagctcatcagccgcacaaacaaatacattgatgagacagctccatgggtgcttgcgaaagatccggcaaaagaagaagaattgcgatcagttatgtatcatctcgctgaatcattgcgtatttcagcggtactgcttcagccattcttaacaaaaacacctgaaaaaatgttcgagcagctgggcattactgatgaatctttaaaagcttgggacagcattacagctttcggccagctgaaagatacaaaagtacaaaaaggcgagccattgttccctcgtttagaggcagaagaagaaattgcttacatcaaagggaaaatgcaaggttcagcaccagcgaaagaagaaacaaaagaagaagagcctcaagaggtcgatcgtttacctgaaattacgattgatcaattcatggatgtagagcttcgcgtagctgaggtcattgaggcagaaccagtgaaaaaagcagaccgtttattgaagctgcagcttgatcttggttttgaaaagcgccaagtggtatccggcattgcgaagcattatacgcctgaagagcttgttggaaaaaaactcgtttgtgtaacaaatctaaaaccggttaaactcagaggagagctttctcaaggtatgatccttgcaggagaagcagacggcgttttaaaggtcgtgtctatcgatcagtcgttaccaaaaggcacaagaattaaataatgataaaacaaaaggtgtttcacgtgtaacaattcgtcgaacaccttttgtgtttcgacaagaaaggagtttttcacttatgttgtttgacacacacgcgcatttaaatgcagaacaatatgatactgatcttgaagaggttattgaacgggcaaaagctgaaaaagttgaacgaattgtcgtagttggttttgaccgtccgacgattacccgtgcgatggaaatgattgaggaatatgattttatttatgcagccattggctggcaccctgttgacgctattgacatgacagaggaagacttagcgtggattaaagagctttctgctcatgagaaagtggtagcgataggggaaatgggactggattatcattgggataaatcacctaaagatattcaaaaagaggtgtttagaaaacaaatcgccttagcgaaagaggtcaatttgcctattatcattcataaccgtgatgcaacggaggatgtcgtgaccattttgaaagaggaaggcgcagaagctgtgggcggaatcatgcactgctttacaggaagtgcggaagtggcaagagaatgcatgaaaatgaatttttatttatcatttgggggaccggtgacatttaaaaatgcgaagaaaccgaaggaagtagtgaaggaaattcccaatgaccggctgctgattgaaacggactgcccgtttctcacaccgcaccctttccgcgggaaaagaaatgagccaagctatgtgaaatatgtggcagaacaaatcgccgaattaaaagaaatgacctttgaagagattgcttccatcacgactgaaaatgcgaaaagacttttccgtataaactgacaaaaaacgctagcgggttttgtaagagcttgtcccttacagcgtttttctataaaagttctacatgctttcttctcctcataggataggtttgtcgacaagtctttcttccgtttctcagtgtatttcaggataatgaagaggacactgagcttttgggagaaagagaagggagggttgacagccttttagatactctatataatctctccgaggagaaggaggcgtttttcatcacacaaaaaatgaaaaagctgttttccgtaaagcttagcaaaagcaaagtcattctggttgctgcttgtttgcttttggcaggaagcgggactgcgtacgcggctcatgagctgacgaaacaatcagtctcagtttctatcaatggcaaaaagaaacatatacgcacacatgcaaatacagtcggtgatcttttggagacgcttgatataaagacaagagacgaagacaagatcacacctgctaaacagacaaagataacagcagacatggacgttgtgtatgaggctgcaaaacctgtgaagcttacaataaacggggaagaaaagacgttatggtcaacagcaaaaacggtcggtgcattactggacgaacaagatgttgatgtgaaagaacaagatcaaattgatcccgtaatagatacagatatttcgaaagacatgaagattaacatagagcccgcatttcaggttactgtgaatgatgcagggaaacaaaagaagatctggacgacttcgactacggtcgctgactttttaaaacagcaaaagatgaacataaaagacgaagataaaatcaagcctgcgttagatgcaaagctgacgaaaggaaaggctgatattacaattactcgtatcgaaaaggtcaccgatgtagttgaagagaagattgcgttcgatgtgaaaaagcaagaagacgcttctcttgaaaaagggaaagaaaaggtcgtccaaaaaggaaaagaaggcaagctaaaaaaacatttcgaagtcgttaaagaaaatggcaaagaagtgtccagagagcttgtaaaagaagaaacagctgagcaaagcaaagataaagtgattgctgtcggcacaaagcaaagcagtccaaaagttgaaacggtcagtgcttcaggtgattcaaaaacagttgtgtcccgcagcaatgaatcaacaggcaaagtcatgactgtatcatctacggcttatacggcaagctgcagcggttgttcaggacatacagcgacaggcgtcaatttaaaaaataatccgaatgccaaagtcatcgctgtggatccaaatgtcattccgctaggctccaaagtccacgtggaaggctatggatatgccattgctgcagataccggttcagcgattaaagggaacaaaatagacgtctttttcccagagaaatcatcggcgtaccgatggggaaataaaacagtcaaaattaaaatcttaaattaatatatacttatgtattcagagggttttgcgccctctgtttttttcgttataatagacaaagtgcattttctgcttattagacgctcgatataagaaaaagtttcatgaatatacaaaagtttttattttgtcttggaggaaataatgaaaattaaagagatcattgtggtcgaggggcgtgacgatacggcccgcatcaaattggctgttgatgcagacacaattgaaacaaatggttcagccatcgatgatcatgtgattgaccaaatccgtttggcccagaagaccagaggcgtcattattttaacggatccggactttccgggagagaagattcgcaaaaccatctcagaggctgtacctggctgtaagcatgcatttttgccaaaacatcttgccaaacctaaaaacaagcggggaattggtgtagagcatgcatcggttgaaagcattagggcatgtttagaaaatgtgcatgaggagatggaagcgcagccgagtgacatttcagctgaggatttgattcatgccggactaataggcgggcctgcggccaaacgccgccgggaacgactgggtgatctgttgaaaatcggctatacaaatggcaaacagcttcaaaaacggctgcaaatgtttcaaattaaaaaaagtgattttatgagtgcgctcgataccgttatgcgggaggaacagaatgaataaagatattgcgacaccgattagaacgaaagagatactgaagaaatacggtttttcttttaaaaagagcttaggacagaatttcttaattgatacgaacattttaaacagaattgtcgatcacgcggaagtgacggagaaaacaggtgtcattgaaatcggcccgggaatcggggctttaaccgaacagcttgccaagcgggcgaaaaaggtcgtggcatttgagattgaccagcgactattgccgattctgaaggatacactgtcaccttacgacaatgtcactgtcattcatcaggacgtgttaaaggctgatgtcaaatcagtcattgaagaacaatttcaagattgtgatgagatcatggtagttgccaaccttccttattacgtaacaacaccgattatcatgaaactgcttgaagaacaccttccgctgaaagggattgtggtcatgctgcaaaaagaagtggctgagcgcatggcggctgatccttcatctaaggaatacggctcgctttcaatcgcggtgcagttttatacagaagccaaaacggtgatgatcgttccgaaaaccgtatttgttcctcagcctaatgtcgattccgcagtcatccgtctgattctccgagacggcccggcagtggacgtggaaaacgaatcctttttctttcagctcatcaaggcaagctttgcacagcgtcgtaaaacgctgctcaataacttagttaacaatctgcctgaaggaaaagcgcaaaaatcaacgattgagcaagtgctcgaagaaacaaatattgacggtaagcgccgaggcgaatccctgtctattgaggagttcgcagcgctgtctaacggattgtataaagcccttttctaaaagggctttttgttttgcgcaccacatggactgccgctacataggctagagaaggacctttcattcaatgataagaaaaaacttggactcagcgaaaaaaggcgctttctcaaggctctttctttcatgatgaggcttagtctatgtgtggagtgaggaatgtgcaatttcaaataggggatatggtagccagaaaatcctatcagatggatgttttgtttcgaattataggaatagagcaaacaagcaaaggaaattcaattgccattttgcatggagatgaagtcaggctgattgctgattcggatttttctgatctggtagcagtgaaaaaagatgagcagatgatgcggaaaaagaaagatgagagcagaatgaatgagtcgctcgaattgctccgccaagattataagctgctcagagaaaagcaggagtactatgcgacaagccaatatcagcatcaggagcattatttccatatgccgggcaaagtgcttcatctggatggcgatgaagcatatctgaaaaaatgcctgaatgtctataaaaaaattggagtgccggtctatggcatccattgccatgaaaagaaaatgtctgcttctattgaagaattgctcgacaaatatcgacctgatatcctggtgatcacagggcatgatgcgtattcgaagcaaaagggcggcattgatgatttgaatgcgtacagacattctaagcactttgttgaaactgttcaaacagcccgaaaaaagatccctcacttagatcagcttgttatttttgcgggggcctgccaatcccattttgaatcactcatcagagcgggtgcgaattttgcgagttcaccgtcaagagtcaatattcatgcgcttgatccggtatatatcgtcgcgaagatcagctttacgccgtttatggaacggattaatgtatgggaagtgctccgtaatacgctgacaagagagaaagggcttggaggtattgaaacaagaggagttctgagaattggtatgccttataagtccaattaacagttgaaaacctgcataggagagctatgcgggttttttattttacataatgatacataatttaccgaaacttgcggaacataattgaggaatcatagaattttgtcaaaataattttattgacaacgtcttattaacgttgatataatttaaattttatttgacaaaaatgggctcgtgttgtacaataaatgtagtgaggtggatgcaatggcgaagacgttgtccgatattaaaagatcgcttgatgggaatttaggtaaaaggctgacgttaaaagcaaacggtggccgccgaaaaacgattgagcgttcgggcattttagctgagacgtacccttctgtttttgtgatacaactagatcaagacgagaactcgtttgaaagagtttcatacagttatgctgatattttgactgagactgttgagctgacatttaatgatgacgccgcaagctcagtggcattttaacgggcagtgaaccttttgtttactgctttttgttttgcccttttttggtttccaataattttaacgaaagttccatctgatttaacaaaagataaaacagtcacatattatcgtgacgtgcacgaatggctatcacttctaaaaaaggggttgtttcgtttgggcagacgtcgtggagttatgtcagatgagtttaaatatgagctggctaaagaccttggtttttatgacacagtaaaaaatggcggctggggcgaaattcgggctcgcgatgccggtaacatggtaaagcgcgctattgaaatcgccgaacagcaaatggctcagaatcagaataaccgataaggatgtgacccgggggacgtgctgttccctggtttttttattttggatataaatacataatgggctgaatatggatatgttcatcctgtacttcaaatgtgatacaatgttcatacttatgtttagatggagaagtaggtgaaagctatgcgtattttagaaaaagcgccagctaagatcaatctgtcacttgacgtcacccgaaaacgcccggatggctatcatgaagtcgaaatgatcatgacgacaattgatttagctgatcgaattgaattgacggagcttgcagaggatgaagtgagggtttcctcccacaaccgatttgtgcctgatgaccaaagaaacttagcttatcaggctgccaagctgatcaaggacagatacaacgtgaaaaagggagtttccatcatgattacgaaggtaattccggtggctgccggtcttgccggcggaagcagtgatgcggcggcgacactcagagggctgaacagactgtggaatttaaatctgtccgcggaaacgcttgctgagcttggagcggaaattggctctgacgtttcattttgtgtctatggcggaactgcattagcaacagggcgcggcgagaaaattaaacatatcagcacgcctccgcactgctgggtcattttagcgaagccgacaatcggtgtttcaactgctgaagtgtacagagcgctgaaactggatggtatagagcatcccgatgtacaaggcatgatcgaggcgatagaagagaagagttttcagaagatgtgcagccgtttaggcaatgtgcttgaatctgttacactcgatatgcatcctgaagttgcaatgatcaaaaaccagatgaaacgctttggtgcagatgccgtgttaatgagcgggagcggcccgacagtgtttggactggttcagtatgagtcgaaggtgcagagaatttataacgggttaagaggcttctgcgatcaagtttatgcggtgagaatgatcggcgaacagaacgctcttgattaaatccgtatgttaagttatattgatcttaaaatattcggattttgggggtaagttcatgaagtttcgtcgcagcggcagattggtggacttaacaaattatttgttaacccatccgcacgagttaataccgctaacctttttctctgagcggtatgaatctgcaaaatcatcgatcagtgaagatttaacaattattaaacaaacctttgaacagcaggggattggtactttgcttactgttcccggggctgccggaggcgttaaatatattccgaaaatgaagcaggctgaagctgaagagtttgtgcagacacttggacagtcgctggcaaatcctgagcgtatccttccgggcggttatgtatatttaacggatatcttaggaaagccatctgtactctccaaggtagggaagctgtttgcttccgtgtttgcagagcgcgaaattgatgttgtcatgaccgttgccacgaaaggcatccctcttgcgtatgcagctgcaagctatttgaatgtgcctgttgtgatcgttcgtaaagacaataaggtaacagagggctccacagtcagcattaattacgtttcaggctcctcaaaccgtattcaaacaatgtcacttgcgaaaagaagcatgaaaacgggttcaaacgtactcattattgatgactttatgaaagcaggcggcacaattaatggtatgattaacctgttggatgagtttaacgcaaatgtggcgggaatcggcgtcttagttgaagccgaaggagtagatgaacgtcttgttgacgaatatatgtcacttcttactctttcaaccatcaacatgaaagagaagtccattgaaattcagaatggcaattttctgcgtttttttaaagacaatcttttaaagaatggagagacagaatcatgacaaaagcagtccacacaaaacatgccccagcggcaatcgggccttattcacaagggattatcgtcaacaatatgttttacagctcaggccaaatccctttgactccttcaggcgaaatggtgaacggcgatattaaggagcagactcatcaagtattcagcaatttaaaggcggttctggaagaagcgggtgcttcttttgaaacagttgtaaaagcaactgtatttatcgcggatatggaacagtttgcggaagtaaacgaagtgtacggacaatactttgacactcacaaaccggcgagatcttgtgttgaagtcgcgagactcccgaaggatgcgttagtcgagatcgaagttattgcactggtgaaataataagaaaagtgattctgggagagcccgggatcacttttttatttaccttatgcccgaaatgaaagctttatgacctaattgtgtaactatatcctattttttcaaaaaatattttaaaaacgagcaggatttcagaaaaaatcgtggaattgatacactaatgcttttatatagggaaaaggtggtgaactactgtggaagttactgacgtaagattacgccgcgtgaataccgatggtcgcatgagagcgattgcatccatcacgctggatcacgaatttgttgtacatgatattcgtgtgattgatggaaacaatggtcttttcgttgcgatgccgagtaaacgcacccctgatggagagttccgcgatattgctcatcctattaattcaagcacgcgaggaaagattcaagatgccgtgttaaatgagtatcatcgtctgggtgacactgaagcattagaattcgaagaagctggagcttcttaaaaaataaccaaaaagcaaggactgctgaaagggctgacataagccttttgccggcggtccttttttaattctgatttttcaaacttagttgcactcaatagaaaattcttgcacttcatgaagtctccttgaaatcagaagatatttaggatatatttttctatggataaaagggatattggaggccaataaatggataagcggtttgcagttgttttagcggctggacaaggaacgagaatgaaatcgaagctttataaagtccttcatccagtttgcggtaagcctatggtagagcacgtcgtggacgaagccttaaaattatctttatcgaagcttgtcacgattgtcggacatggtgcggaagaagtgaaaaagcagcttggtgataaaagcgagtacgcgcttcaagcagaacagcttggcactgctcatgctgtaaaacaggcacagccatttcttgctgacgaaaaaggcgtcacaattgtcatttgcggagatacgccgcttttgacagcagagacgatggaacagatgctgaaagaacatacacaaagagaagcgaaagctacgattttaactgcggttgcagaagatccaaccggatacggccgcattattcgcagcgaaaacggagcggttcaaaaaatcgttgagcataaggacgcctctgaagaagaacgtcttgtaactgagatcaacaccggtacgtattgttttgacaatgaagcactatttcgggctattgatcaggtgtctaatgataatgcccaaggcgagtattatttgccggatgtcatagagattcttaaaaatgaaggcgaaactgttgccgcttaccagactggtaatttccaagaaacgctcggagttaatgatagagttgctctctctcaggcagaacaatttatgaaagagcgcattaataaacggcatatgcaaaatggcgtgacgttgatcgacccgatgaatacgtatatttctcctgacgctgttatcggaagcgatactgtgatttaccctggaactgtgattaaaggtgaggtgcaaatcggagaagatacgattattggccctcatacggagattatgaatagtgccattggcagccgtacggttattaaacaatcggtagtcaatcacagtaaagtggggaatgatgtaaatataggaccttttgctcacatcagacctgattctgtcatcgggaatgaagtgaagatcgggaattttgtagaaattaaaaagactcaattcggagaccgaagcaaggcatctcatctaagctatgtcggcgatgctgaggtaggcactgatgtaaacctgggctgcggttcaattactgtcaattatgatggaaagaataagtatttgacaaaaattgaagatggcgcgtttatcggctgcaattccaacttggttgcccctgtcacagtcggagaaggcgcttatgtggcggcaggttcaactgttacggaagatgtacctggaaaagcacttgctattgccagagcgagacaagtaaataaagacgattatgtgaaaaatattcataaaaaataatcctaaattcggaggtttatccatgtctaatcaatacggagataagaatttaaagattttttctttgaattcgaatccagagcttgcaaaagaaatcgcagatatagttggagttcaattagggaaatgttctgtcacaagatttagtgacggggaagtccaaattaatatcgaagaaagtattcgcggatgtgattgttacatcatccagtctacaagtgaccccgttaacgagcatattatggaactgctgattatggtagatgcgttaaaacgcgcttctgcaaaaacgattaacattgttattccttattacggttatgcgcgtcaagacagaaaagcaagatcccgtgagccaatcacagctaaacttttcgctaacctgcttgaaacagccggtgcgactcgtgtgattgcacttgacctgcatgcgccgcaaattcaaggattctttgatataccgattgaccacttaatgggtgttccgattttaggagaatattttgaaggcaaaaatcttgaagatatcgtcattgtttcacctgaccatggcggtgtgacacgtgcccgcaaactggctgaccgactaaaagcgccaattgcgattattgataaacgccgtccgcgtccaaacgtggcggaagtcatgaatattgtaggtaacatcgaagggaagactgctatcctcatcgatgacattattgatactgcaggtacgattacacttgctgctaatgcgctcgttgaaaacggagcgaaagaagtatatgcatgctgtacacaccctgtactatcaggccctgcggtagaacggattaataattcaacaattaaagagcttgttgtgacaaacagcatcaagcttcctgaagaaaagaaaattgaacgctttaagcagctttcagtcggaccgcttctggcagaagcaattattcgcgttcatgagcagcaatcagtcagctaccttttcagctaaaccgattttgaaaggtttaaacctttatcgttttgggtattgtttgtaataggacaactaaaacgacaataggatggtgctgaatatggcaactttaacggcaaaagaaagaacggactttactcgttcgtctcttcggaatatccgtacttcaggacatgttccaggtatcatatatgggaaggatacgggtaacaaacctgtgtcattagacagtgtggagctcatcaaaacgctgagggacgaaggcaaaaatgcagtcattacgcttgaggtcagcggagaaaaacactcagtcatggtaacagacctgcagacggacccgctgaaaaatgaaatcactcatgctgattttcaagtagttaatatgagtgaggacattgaagtggaagttccgattcatctgaccggagaagccattggagtgaaaaacggaggcgtactgcagcagccgttatatgcacttactgtaaaggccaagccaaaagccattccgcaaacgattgaggctgatatttcaagcctcgatgtaaatgaagtactgacgattgcagatttgcctgctggcggtgactactcctttaatcatgaatcagatgaggttgtggcttcaatccttcctccgcagcagcaggaagcagctgaggtcgatgaagaggaatctgccgatgctcagccagaaggtgaaaacgaacaataatagcttaaggcgtaaccctcccgcggttacgtcttttgtgctagaatgagaagaattatagcccgtttatgaagacgggagttatgtgactaagggaggattcgccatgcttgtgattgccggtctcggaaacccggggaagaactatgaaaacacacggcataatgtcggatttatggtgatagatcagcttgcaaaggaatggaatatagagctgaatcaaaataaatttaacggattatacggaaccggatttgtttccggcaaaaaggttctacttgttaaaccgcttacatatatgaatttatcaggagaatgtttgcggcctttaatggactactatgatgtcgataacgaagatttgacagtcatttacgacgaccttgaccttccgactggcaagatccgtttaagaacgaaaggaagcgccggagggcacaatggcatcaaatcactgatccagcatcttggaacatccgagtttgaccgtatccgcatcggaatcggccggcctgtaaacggcatgaaggtcgttgattatgtgttaggctcctttaccaaggaggaggcacctgagatcgaagaagcggttgataaatctgtgaaggcttgtgaggcttctttgagtaaaccgtttttagaagtcatgaacgaatttaacgcaaaggtataaaatgtaacaacaaagtccatactacaccaaaatgactttttcatcaggaggtcccttgtatggctttgcattattattgtcgtcattgcggagtgaaagtaggcagtctcgaatcttcaatggtatcgacagactcacttggatttcagcacttaacaaatgaggaaagaaacgatatgatttcttataaagaaaatggagatgtccatgttttgacgatatgtgaagactgccaagaggcgcttgaccgaaatccgcattaccacgaatatcacacatttattcaataaaaagctttggtgtagacactagaccaaagcgtttttctgttctcgcaggaaacagagaggaggggccatatggacaacattcaaacctttataaaagaaagcgatgactttaaatccatcatcaacggtttacacgagggcctgaaggaacagctgctcgcgggtctgtcgggttccgcgcgttctgtttttacttctgctctggctaatgaaacgaataagcctatctttctcatcacccataacttatatcaagcccagaaagtaacagatgatctgacttcacttctagaggatcggtctgtccttttgtaccccgtcaatgaactcatttcatcagaaatcgcagttgcaagccctgaattgcgggcgcagcgattagaagtcattaatagactaacgaatggagaagcgccaattgtcgttgctccggtagctgcaatcagaagaatgctgccgcctgttgaggtgtggaaaagcagccagatgctcattcaagtaggccatgatattgaacctgaccagcttgcctcacggctggtagaggtagggtatgagcggtctgatatggtttctgcgcccggggaattcagtattcgcgggggaatcattgacatttatccgttgacttcagagaatccggtgagaattgaactttttgacaccgaggtggattcaatccgcagctttaattcagatgatcagcggtcaattgagacccttacctcgatcaatatcggtcccgcgaaggaattaattatcagaccggaagaaaaagcgcgggcgatggagaaaatcgatagtggtcttgccgcgagcttgaaaaaattaaaggctgacaaacaaaaagaaatacttcatgcgaatatttctcacgataaagaacgcttgtctgaaggccagacagatcaggagctcgtgaagtatctctcatatttctatgaaaagcctgctagtttactagattatacacctgataatacacttctgattttggatgaagtcagtcggattcatgagatggaagaacagcttcaaaaagaagaagcggagtttataacaaatcttcttgaggaagggaagattttgcatgacattcgtttgtcattcagcttccaaaaaatagtggttgagcaaaaacggcctctgctgtactactctttatttttgcggcatgtacaccatacgagcccgcaaaatatcgtcaatgtgtcaggccggcaaatgcagagtttccatggccaaatgaacgtgcttgcgggcgaaatggagcgttttaaaaaatcaaatttcactgttgtgttcttaggagcaaacaaggaacgtacacagaaattgtcatctgttttggctgattatgatatcgaggctgccatgacagacagcaaaaaagcgcttgttcagggacaggtctatatcatggaaggcgagctccaatcgggatttgagctgccgttaatgaagcttgccgttattacggaagaagaactgttcaaaaaccgtgtaaagaagaagccgcgaaaacagaagcttaccaatgcagagcgcatcaaaagctattctgagcttcaaattggagattatgtcgttcatattaatcacgggatcggaaaatacctggggatcgaaactcttgaaatcaacggcattcataaagactatttaaatatacattatcagggcagtgacaagctttacgtccctgtagaacaaattgatcaggtccaaaaatatgttggctccgaaggaaaagagccaaagctgtataaattaggcggaagtgaatggaagcgggtcaagaaaaaagtagagacatccgttcaggatattgctgacgacttaattaagctgtatgccgaaagagaagcgagcaagggctatgcgttttctcctgaccatgagatgcagcgtgaattcgaatcggctttcccttatcaagagactgaggatcagctccgttcgattcacgaaatcaaaaaagacatggaaagagaacgtccgatggaccgcttgctgtgcggagatgtgggctacggtaaaacagaggttgccatacgtgccgcgtttaaggcgatcggtgacggaaagcaggtagctctgctcgttccgacaacaattttggcacagcagcactatgaaaccataaaagagcgcttccaggactatccgattaatatcggccttctcagcaggttcagaacgcgaaaagaagcaaacgaaacaatcaaagggctgaaaaacggaacggttgatatcgtcatcgggacgcatcggctgctatcaaaggatgtcgtgtataaagacttagggctcctcatcattgatgaagagcagcgtttcggtgtaacccataaagaaaagatcaagcaaataaaagccaatgttgatgtattaacgttaacagcaacaccgattccgcgtacgctgcatatgtctatgcttggcgtaagggacctttcagtcatcgagactccgccggaaaatcgcttccccgtacagacgtatgttgtggaatataacggcgctcttgtcagagaggcgattgaacgtgagcttgcacgcggaggccaggtctatttcttgtacaaccgggtagaggacattgagcggaaagcggatgaaatttcaatgctagtccctgacgcgaaggtagcatatgcgcatgggaaaatgacagaaaatgaattagaaaccgttatgctaagttttcttgaaggagaatcagacgttctcgtcagcacaaccattatcgaaactggcgtggacatcccgaacgtcaatacgctgatcgtatttgacgccgacaagatgggactttctcagctttaccagctgcgggggcgtgtcggccgttctaaccgtgtggcgtatgcgtacttcacgtatcgccgggataaagtgctgacagaagtggctgaaaaaaggctgcaggctattaaagaattcacagagctaggttccggttttaaaatcgcaatgcgtgacttaacgattcgcggagctgggaatcttcttggtgcccagcagcatggcttcatcgattcggtcggatttgacctctattcacaaatgctgaaggaggccattgaggagcgtaaaggagacacagcgaagacagagcagtttgaaacagaaattgatgtcgagcttgatgcgtatattccggaaacttatattcaagacggcaaacagaaaattgatatgtataaacgcttcaggtctgtggcgacaatcgaagagatgaatgagcttcaagatgaaatgatcgaccgctttggaaactatccaaaagaagtcgaatacttgtttactgttgcagaaatgaaagtctatgcgagacaggaacgtgtcgagctgattaagcaggataaagatgctgtcagattgacgatttctgaagaagcaagtgctgaaattgacgggcagaagctgtttgagcttggcaatcaatatggcagacaaatcggactgggaatggaagggaaaaaactcaaaatctccatacagacgaaaggccgtagtgctgatgaatggctcgacaccgtgctgggcatgctgaagggcttaaaagatgtgaaaaagcaaaccatttcatcaacgtaaattttgttactctctggtgtatattacatttgatgtgacggatactaatttcaagcgaggcggaaggtacataaagtaactgctttaggtctttcccacatgtatataccatcaaatgaaagagaggcaccagagatgaaagcaaccggtatcgtacgtcgtattgatgacttaggtcgggtcgtgattcctaaagaaattcgaagaactctgagaatcagggaaggcgatccgcttgagatttttgtagatcgtgacggagaagtgattttgaaaaagtactctccgatcagtgagcttggagactttgcaaaggagtatgcagacgcgctttacgacagcctcggccattcagtgctgatttgtgatcgtgatgtgtatattgccgtgtccggcagctccaaaaaagattacttaaacaagtcaatcagcgaaatgctggaaagaacaatggatcagcgcagctccgtgcttgagagtgatgcgaaatcagtacagcttgtgaatggaattgatgaggacatgaattcttatactgtcggcccaattgtggcgaacggtgatccgataggtgctgtggtgatcttttcaaaagatcagacaatgggcgaagtagagcataaagccgttgaaacagcagctggatttttggctcgtcaaatggaacagtaggtcttattcctttcttcgaaaataggtatgtaaagaacagctctccttgggacgctgttctttttcatgcgtgccgaaaaaggaatccaagggttgggatgtggtataataacctcgtttttatttgtgccgcggtaatacgtgaaccgtattgcccctgacgttgggaaggagcttttggatggacgattcaataggcgttaaacggcattggatttggcagggggcttttgttttaattctggcaggcatcatcacaaaaattttaagcgctgtttacagagtcccgtttcaaaacattgtcggcgatgttggattttatatatatcagcaggtatatccctttcttggtattgcggtcatgctgtccacatcaggatttccagtcattatttcaaagctgatgaatgattatagtgaaaaaaatcatcacaccatattaaaaatatcagcgttgtttttgtctttaatcggtattttattatttctttgtttatatctgggtgctgttcctattgcactctttatgggagattcgcatctagccgtgttaattcaagtggccgcatacgcgtttctgctgttcccatttgtcgcgttgcttagaggcggttttcaggggcggcacgaaatgctcccttcagccttatcacagatgacagagcagtttctgcgtgttgcggtgctcttgggtttatcattttggctcgtgaaaaagggagcctcgctttatactgcgggagcggcagccgcttcaggctctcttgccggaagtttggttgcattgataatactgggttttttttggttcaaaacgaaaagagacaaccaaacggataggcaaaacgaaaatgtcatcacaacaaaagaattgacgaaaaaactgcttttatattcggttacaatttgtgtaagcagtttgctgcttttgtttatccagctcgttgatgctttgaatttatatgcattgctttcgggtggtgaggcaagcgaagaagcaaaacgcttaaaggggatctatgatcggggacaacccttgctgcagctcggctcagtttttgccgtaagcattgcgacgtcactcgttccgtatatttctatggctgtaaaaaacaaagagctgaagatcatgaaagaaaaaatcacgtcatctttgaaactatgccttgtgctcggtacaggcgcatcggctgggttgatttgcattcttaagccggttaatatcatgctgtttcaaaatggagaagggacaggtgcgttacaagtatttagctgctccattttgtttgcatccttggcggtaacggcagcggcagtcttacagggagcggggtacacagtttttcctgcgatagcggtgggcgcgggtgttgcagtgaaatgggtgttaaacacacttttggttccgcgctatgggattgaaggcgcatcgcttgcgacagctgcttcctttgcggctgtcgccggccttaacttgtatcagcttcggcaaaaggaatggctcgataagcttagaggcgttttgattccgattattggatctgctcttttgatgtcagctgttttgcttgcgtatacgcgtctctggactttcttgtttcctgcaacaggaagaggagcggctgtgattgagagtctttctgctgttgccattggtggcgcggtgtttatttattgtatgatgagattgggaatatttacagatgaagagctgaacagtgtgccattcggcagcaagttaagcaaattcatgagaaggagagaacaaaatggcgggtaaaattacagtcgtcggacttggtgccggagacatggaccaattgacaattggtatacacaagctgctgacgaaggcagatacgctgtatgtcagaaccaaggatcatcctttaattgaggagcttgaaaaagaaacgaagaacatccgtttctttgatgatatatatgagaaacatgatcagttcgaggcggtatatgaagaaattgcagatatcctctttgaagcggcgcggcgtgaggacgtggtttacgctgtgccgggacacccttttgtcgcagaaaaaacagttcagctgctgacggagcggcaggaaaaggaaaacgttcaagtgaaagtcgcggggggacaaagtttccttgatgccacattcaatgccttgcaaattgacccgattgaaggttttcaatttgtggatgccggcacattgtccgcggatgagcttgagctcagacatcatctgatcatatgtcaggtttacgaccaaatgacggcttctgaagtcaagctgacattgatggagaagctgcctgatgattatgaggtcgtcattgtgactgcagcaggcagccgtggcgaggagatcaggacagtgccattatttgagctggaccgcaatgtcgctttgaacaacttaacaagtgtgtatattccgccgattaaagaagagaagctgctttatcacgaattctccacgttccgaagcatcatcagagagcttcgcggacctaatggatgtccgtgggataaaaagcagacgcatcagtcattaaagcagtacatgattgaagaatgttatgagcttctcgaagctattgacgaagaagacacagaccatatgatcgaagagcttggcgacgttttgcttcaggtcttgcttcacgcgcaaattggtgaagatgaaggttatttcacaattgatgatgtcataaaaggaatcagtgaaaaaatggtccgaagacatccccatgtgtttaaagatgttaaggttcaggatgaaaacgatgttttagccaattgggaagatataaaaaaggccgaaaaaaatacatctgaatcatcattactagacagcgtaccgaaaacccttccagctctttcgaaagcagctaaattgcagaaaaaagcagcgaaggtcggttttgactgggaagacgtcagcgatatttgggaaaaggtaagtgaggaaatgaaggaattttcttctgaggtttctgaagctcctcacgaacacaatcttaaagctgagtttggcgacattttgttcgcgctggtgaatgtagcccgcttctacaaaatagagccagaggaagcgctgaccatgactaatgacaaattccggagacggttctcgtacattgaggaaacagcgaaggaagagggagtcgagttggctgatatgtcccttgaggacatggacaaactgtggaatgaagcaaaagaaactgagaggagatcatagatatgagattagataaatttttgaaagtatcacggctgatcaaacggcgtacactagcgaaggaagtagctgaccaaggacgaatctctattaacggaaaccaagctaaagctagctctgacgtaaaaccgggagatgaactaacggtccgcttcggccaaaagcttgtaacggttcaagttaatgaattgaaagacacgacgaaaaaagaagaagctgcaaacatgtacacgattctaaaagaagaaaaactcggcgaataggcttgttctaaaaaaatcccccacctcatacaatgcagtaataatgctaaaagtatcgaggatatgggggctgaatagatgaattcatattatgatcaaaaaggttcttcgtctgttccggaacagcatgatgtgacaatgaaaggccggaagcatttagatatttctggggttaagcatgtggagagttttgataacgaagaattcctgctggaaacggtgatgggaatgctctccgtcagaggccaaaacctgcagatgaaaaatcttgatgtggaaaaagggattgtttcgattaaaggcagggtatttgatttagtgtacttagacgaacaacaaggggataaagctaaagggttttttagcaagttgtttaaatgacgctgacgacacaattctatacaatgctagcgatgtccggtatgggtctctggcttggtgcttcgcttgatacataccggctctttgtcattcgtgccaaaacagccagatggctattatttattcatgatattcttttctggattgtgcaagggctgcttttcttttatgtcttgcttcatgtaaatgagggagaattcaggatttacatctttttagcggttctgctgggcgttgcgacgtatcagagcctttgcaaacgaatctatataaaaatactgaaattcgtcatttaccttgttgcttctgtttatcaattcttcaaaaaactcattcagcacgtgttatttcgtcctattgtgtggacatgcggagcgatcatctggctggcggcatttttattcaagaaaacatacagcctgataggttttctcctgctgtgtctatataaaatagtcatggttctgtgttttccgatccgttttatcgcgaaacaatgtttgaaacttcttcctgtgaaaatgcgtctaacttttagacgttattttgaaaaaggtgcaggatttctcaaaaagaagaagaaactattgataaccataagaacgaccattacacggtttttgaagaaatgaaaggaggaccgtctggtttgaatttttccagggaacgaacgataactgaaatacaaaacgactataaagaacaagtagaacggcaaaatcagctgaagaaacgaagacgcaaagggctgtacagacggttaactgtattcggcgccctagtattcctgacggcaattgtgctggcaagctctgtatggtcccaaacatcttcccttagtgcaaaagaagaaaagaaagaacagcttgaaaaagaactgaaaagtttaaagacaaaacaaacggatttaaaagaagaaatatccaaattgaaggatgaggattacgtcacagagcttgccagaagggacttattcatgtctggagacggagaaattatcttcaatgtggagaagaagagcaagtagccttgttgacacttaaatttttatttaggtataattaagcaaacgatctttttataagcctaaggaggagcactttttttatgtcgattgaagttggcagcaagttgcaagggaaaattacaggtattacaaattttggagcatttgttgaattgcctggaggctcaaccggtctcgttcacattagtgaggtagctgataattatgtcaaagacattaacgaccacttaaaagtcggcgaccaagttgaagtgaaagtcatcaacgttgaaaaagacgggaaaattggtttatctattaaaaaagctaaagaccgtccgcaagccagacctagaaatgatttccgtccgaaagaatcttttgaacagaaaatgaataagtttttaaaagacagcgaagatcgcttgtcatctttaaaacgcaatacggaatcaaaacgtggagggcgcggagcaagaagaggataacttgctgctttctataaaataaatgaagcatccgttcatcccgacggatgcttttttattatcctcatcctctttaagagtcagaaaattacaacattaaagtttctgttgacgaaagagacaaacctttgtattatataacttgtgcttagaagcacaaaacaatatggcggtgtagctcagctggctagagcgtacggttcatacccgtgaggtcgggggttcgatcccctccgccgctaccatatttgtttggcccgttggtcaagcggttaagacaccgccctttcacggcggtaacacgggttcgaatcccgtacgggtcatcctaaaaaatcggtttctcttgcagaagccgatttttttcatttttagacaacattccggaaattcttttcataaacgaatatcaaggcagaaaccgtcgaagatttctttggtattgttaccttcttttgacaaaatcctatctgtgctttcgctataatgacaggcaacgaatataacaggtgggagatgagaggaatggaaaaagcagaaagaagagtgaacgggccaatggcgggacaagctttggaaaaactccaatcgttttttaacaggggcacgaagctggtgactcatcatttgcattcactgtttttctataaaggattcatttatgttgttatcggatttttgcttggacgggctttcatattatccgaggtgcttcctttcgcacttcctttctttggagcgatgcttctcatcagaagagacaaagcgttttatgcggttttggctgtgcttgcaggtgcgctgaccatatctccaaagcactcattgctcatactggcggcattgctggcattcttcgtattttctaaagtggctgccttcattaccgacgatcgtgttaaagcactcccgattgtcgtgttcttctcgatggctgcagcaagagccgggtttgtttatgcccaaaatggcgtatttacaacctatgattatgtaatggctatcgttgaggctggactgtcgtttatcttaacactgattttccttcagagccttccgatttttactgtgaaaaaagtgaaacaatcattaaaaatagaggaaattatctgctttatgattcttattgcctctgttttaacggggctggctggcttgtcctaccaagggatgcaggcagaacatatattggctcgttatgttgtgttgagtttttcctttattggcggagcaagcatcggctgtacggttggtgttgtgaccggcctgattcttggcttggcgaatatcggaaacctatatcaaatgagtctgcttgctttttccggtttattgggcggtttgctgaaggaaggaaaaaaagcgggtgcagcaatcggtctgatcgttggttcacttcttatatctttatatggtgaaggctctgccggtctgatgacaacgctctatgagtcattaatcgcagtcggcctgtttttgctcacacctcaatctattacaaggaaagtggcgagatatattccgggaactgtcgagcatcttcaagagcaacagcaatacgctagaaaaatccgtgatgtcactgctcagaaggtagaccagttctccaatgtatttcacgcgctgtctgaaagctttgcaaccttttaccaagcgtcagacgaacagacagatgacagcgaagttgatctgttcttaagcaaaatcacggagcattcctgtcagacgtgctacaagaaaaacaggtgctgggtacagaactttgataaaacatatgatttaatgaaacaagttatgcttgaaacagaggaaaaagaatatgcatcaaaccgaaggctaaaaaaagagtttcaacagcattgttctaaatccaagcaggttgaagagctgattgaggatgagctcgcacatcatcatgcccatttgacactcaagaaaaaagtccaagacagcaggcgccttgttgctgaacagcttttaggtgtttctgaggttatggccgacttttctcgggaaataaaaagagagcgagaacagcactttctgcaggaagagcaaatcatagaagcgcttcagcatttcggaattgagattcagcatgtcgagatctatagccttgaacaaggaaatatcgatattgaaatgaccattccgttcagcggacatggagaaagtgaaaaaatcattgcccctatgctgtctgacattctggaagaacaaattcttgtgaaagctgaacagcactctccgcatccgaatggatacagccatgtcgcctttggatcaacaaaatcatacagggtgtccacgggagctgctcacgctgcgaagggcggcggccttgtctccggcgacagctacagcatgatggagcttggagccagaaaatatgctgcagcaatcagtgacggaatgggcaatggcgcaagagcgcactttgaaagcaatgaaacgatcaagcttcttgaaaaaatccttgaatcgggaattgatgaaaaaatagcaattaaaacgatcaacagcatactgtctctaaggacaactgacgaaatatattccacgcttgacctatctattatcgatcttcaagatgccagctgtaaatttttgaaggttggatcgacgcctagctttatcaaacggggtgaccaggtcatgaaagttcaagcgagcaatctgccaatcggtattattaatgaatttgatgtggaggttgtgagtgaacagctgaaagctggtgacctcttaattatgatgagtgatggcatttttgaggggcctaagcatgtggaaaatcacgacttatggatgaagcgtaaaatgaaagggttgaaaacaaatgacccgcaggagattgcagatttgcttatggaagaagtcatccgcacaagatccggccaaattgaggacgatatgactgttgttgttgtccggattgatcacaatacaccgaagtgggcatccattcctgttccggcaatctttcaaaacaaacaagaaatttcataacgcttccgtataaatcaaatttcttctggcgaagatgggaatatatgaatctgagaatcctcgtattctccaggaggaatgaatgtgaacaacggacatttaaatcaaattttgctgataacggatggctgctcaaaccatggggaagacccgcttgcaatggctgcttttgctaaagagcaggggattacggtaaatgtcattggtataatggaagaaaatcaaattgaccctgaggcaatgaaggaagtcgaagggattgcacttgccggaggaggtgtgcaccaagtcgtttatgcatctcagctttcacaaactgttcaaatggtaacaaagaaagcgatgacgcaaaccttacaaggtgtagtcaatcaagaactgaaacagattctcggaaagaatgtggaaatggaagagctttctccggaaaaacgcggcgaagtcatggaagtggtagacgagcttggagaaacggtgcatcttcaggttttggttcttgttgatacaagtgcaagtatggcgccaaagcttccaacagtaaaagaggcgctgattgatttgtctgtaagcctcaattcccgaatcgggaataacgaatttgcgatgtgtatatttcccgggaaaaaacaagaggtcgagcttgtgctgaactggacaccgaagctgcaatctctttccacactctttgcaaagctttcgacaggcggcatcacgccgacaggtccggcgattcgtgaagcgacactgcagtttgaaaaaatacgctcaagaaggggcatgctggcagatgatgaacgacgctttgacgagtttggcatgtagcctcaagccgggtacgacaatcaaaggcaagtggaatggaaacacttatacattgcgtaaacagcttggtaaaggggccaatggaattgtgtatttggcagaagcatcagatggacatgttgccttaaaggtgagtgatgacagcctgtctattacttctgaagtgaatgtcttgaaatctttctcaaaggcccagtccgttacgatggggccttctttttttgatacggatgatgcctatattcccagtaccaatacgaaagtttcattttatgcaatggaatacataaaagggccgctgcttttgaagtatgtcagtgataaaggagcagagtggatacctgtattaatgattcagctgttatccagcttatcggtgcttcaccagcaaggatggatattcggcgatcttaaacctgataatctgatcgtaactggtccgcccgcaaggatccgctgcattgatgtgggcggcacgacaaaggaaggccgggcgataaaagagtatacggagttttatgacagaggctattgggggtatggaacaagaaaggcagagccatcctatgatctgttcgcagttgccatgattatgatcaacagtgtgcataaaaaagaatttaagaaaacgaaccagcccaaagaacagcttaggtctctcatcgaaggaaaccctctgcttcaaaagtataaaaaagtgcttttttcaaccttgaacggagattatcaatccgcagatgaaatgaaaaaggatatgctagacgcggggcaaaaagcagcacaaagaaaacagcctataaaagcatcaccgcagcctgccacacgacatagacagcaaaaaccgcgccaaggaaaaataacgaagacgcgatataccccaaaacagaaaccggctaagtcgggggggttatttgaaacaacgctgatcgtgatcagtgttttagcgctttatttcgcctatattatctttttcttaatctgaatggtgcaaactgcagagcctatgcttcttctttgcttggaggggttgaaagtgttaggatatgaatatctttaaaatacctgctcattgtgaggaggacattgtgaaaagtgtcaaagattttttaaacaaacacaatcttacgttaaaaggggcgacgatcattgtaggcgtttctggcggtccggactcaatggctcttcttcacgcgttgcatacgttatgcggccgttcagcgaatgttattgcagctcacgttgaccatcggttcagaggtgcggaatccgaggaggacatgcgttttgtccaagcttattgtaaagctgaacagctcgtgtgcgaaacggctcaaatcaatgtaaccgcatatgcacaggaaaaaggactcaataagcaggctgcagcacgcgattgccgctaccagttttttgaggaaatcatgtcgaagcaccaagcggactatctggctcttgcgcatcatggtgatgaccaggttgaaacaatgcttatgaaactggctaagggtacgcttggaacgggacttgcgggaatgcagccggttagacgttttgggacggggcggatcatcaggccgttcttaaccattacaaaggaagagatccttcactattgccgtgaaaacggcttgagctaccggacggatgaaagcaacgccaaagatgactacacaagaaacagattcagaagaacagtgctcccgtttttgaagcaggaatctccggatgtgcataaaaggtttcagaaagtgagtgaagcactgacggaagatgagcaattcttacagtcattaacgaaagatgaaatgaataaagtaatcacaagccagtctaatacatcagttgaaatcaattcctctcaattgcttgccctcccgatgcctttacaaagaagaggagttcaactaatattaaactatctttatgaaaacgttccatcatccttttcagcccatcacattcagcagtttctcgattgggcggaaaatggcagtccttcaggagtactggactttccgaaaggactgaaggtggtcaaatcatatcagacatgtttgtttacatttgaacaatggcagtgcaaaaatgttccctttgaataccaaattagcggagcttctgatgaaacggcagtgctccctaatggatatctgatagaggcaaggcattatgcggactcgcctgaagaacatgggaatgctgtttttatcacaagtgaaaaaaaggtgcgatttcccttaacaatccggacgagaaaagctggagaccggatcaaactaaaagggatgaacggctcaaaaaaggtaaaggatatatttattgataagaaactgcctctccaagaaagagacaactggccgattgtgacggacgcaagcggtgaaattatctggatacctggcttgaaaaaatcaatttttgaagatcttgtgattccaaacagcgaccgcattgtattacaatatagacagcatgaaaagtgtagggggcaagcaaaatcatgatgaaacatgatatcgagaaagtactgatctcagaggaagagatacaaaagaaagtaaaagagttaggtgcagaattaacgagcgagtatcaagatacatttccgttggcaatcggtgtgttaaaaggagcacttccttttatggcggatcttatcaagcatattgatacatatttggaaatggatttcatggatgtatcaagctacggaaattctacggtttcttctggagaagtaaaaatcattaaagatttggatacatctgtagagggccgggacatcttaattattgaagatatcatcgacagtgggttaaccttaagttatctcgtagagctcttccgataccgtaaagcaaaatcaattaagattgttacccttttggataaaccgagcggaagaaaagcggacatcaaagcagactttgtcggttttgaagttcctgacgcgtttgtagtgggttacggacttgattatgctgagcgctatcgcaatctgccttatatcggagtgttaaaaccggcagtttatgaaagctgatcggcagcctgcttccgagatggttattgtttgtattggaatgattttctatggtactattgaacatagttgtgcttactgtgggaggaggtaaggaatgaatcgggtcttccgtaataccattttttatttacttattttattagtagtaatcggggttgtgagctacttccagacctcaaatccgaaaacagaaaatatgtcgtacagtacgttcatcaaaaacctggatgacgggaaagttgatagcgtatcggttcagcctgtcagaggtgtttatgaggtaaaagggcagctgaaaaactacgacaaagatcaatactttttgactcatgttcctgaaggaaagggagcagaccagatatttaacgctttgaaaaagacagacgtaaaggttgagcccgcgcaagaaacaagcggatgggtgacgttcctgacgaccatcatcccatttgtcattatctttattctgtttttcttcctgctcaatcaggctcaaggcggcggcagccgtgtcatgaactttggcaagagtaaagcgaagctgtatacagaggaaaagaaacgcgtcaaatttaaagacgttgcaggggcagacgaagaaaagcaagaacttgttgaagttgttgagtttctgaaagatccccgcaagtttgccgagctcggcgccagaataccgaaaggcgtgcttttagtcgggcctccgggtaccggtaaaacattgcttgccaaggcttgtgcgggagaagccggcgtacctttcttcagcatcagcggatctgatttcgttgaaatgtttgtaggggtcggtgcttcccgtgtgcgtgacttgtttgaaaatgcgaaaaagaatgcgccttgtttgatcttcattgatgaaattgacgcagtcggacgccagcgtggcgctggtctcggcggtggacacgatgaacgtgaacagacgctaaaccaattgcttgttgaaatggacggattcagcgctaatgaaggaattatcatcattgctgcgacgaaccgtgcggacatcttggacccagccttacttcgtccgggacgttttgaccgtcaaatcacagtggaccgcccagatgtcattggccgtgaagctgtattgaaagtccatgcgagaaacaaaccgctggatgaaacggttaacctaaaatcaattgccatgagaacaccaggcttctcgggcgctgacttagaaaacctcttgaatgaagctgcgcttgtagcagctcgtcaaaacaagaaaaaaatcgatgcgcgtgatattgacgaagcgacggaccgtgtaattgccggacccgctaagaagagccgcgttatctccaagaaagaacgcaatatcgtggcttatcacgaaggcggacacaccgttatcggtctcgttttagatgaggcagatatggttcataaagtaacgattgttcctcggggccaggctggcggttatgctgttatgctcccaagagaagaccgttatttccaaacaaagccggagctgcttgataaaattgtcggcctcttgggcggacgtgttgctgaagagattatcttcggtgaagtcagcacaggggcgcacaatgacttccagcgtgcgacgaatattgcaagacgaatggttacggaattcggtatgtcagaaaaactgggaccgttgcaatttggacagtctcagggcggtcaggtattcttaggccgtgatttcaacaacgaacagaactacagtgatcaaatcgcttacgaaattgatcaggaaattcagcgcatcatcaaagaatgttatgagcgtgcgaaacaaatcctgactgaaaatcgtgacaagcttgaattgattgcccaaacgcttctgaaagttgaaacacttgacgctgaacaaatcaaacaccttgtcgatcatggaacattacctgagcgtaatttctcagaagatgaaaagaacgatgatgtgaaagtaaacattctgacaaaaacagaagaaaagaaagacgatacgaaagagtaattcgctttctttctaaataaactgccggctgacgctggcagtttttttatgtaaatgatgggctcagctgcggcttttacaatcatccaaatctggtatcgatttgtttacaaatgagccgctgatcgtgtatggtattgtagaatgtttgtaaaagtaaagtagagaaactattcaaaagtggtgatagaggttgttactggttatcgatgtggggaacaccaatactgtacttggtgtatatcatgatggaaaattagaatatcactggcgtatagaaacaagcaggcataaaacagaagatgagtttgggatgattttgcgctccttatttgatcactccgggcttatgtttgaacagatagatggcattattatttcgtcagtagtgccgccaatcatgtttgcgttagaaagaatgtgcacaaaatactttcatatcgagccgcaaattgttggtccaggtatgaaaaccggtttaaatataaaatatgacaatccgaaagaagtgggggcagacagaatcgtaaatgctgtcgctgcgatacacttatacggcaatccattaattgttgtcgatttcggaaccgccacaacgtactgctatattgatgaaaacaaacaatacatgggcggggcgattgcccctgggattacaatttcgacagaggcgctttactcgcgtgcagcaaagcttccgcgtatcgaaatcacccggcccgacaatattatcggaaaaaacactgttagcgcgatgcaatctgggattttatttggctatgtcggccaagtggaaggaatcgttaagcgaatgaaatggcaggcaaaacaggaaccaaaggtcattgcgacaggaggcctggcgccgctcattgcgaacgaatcagattgtatagacatcgttgatccattcttaaccctaaaagggctggaattgatttatgaaagaaaccgcgtaggaagtgtataggaggtttagtaatggattatttagtaaaagcacttgcgtatgacggaaaagttcgggcttatgcggcgagaacgactgatatggtaaatgaggggcagagacgccatggtacgtggccgacagcatccgctgcattgggccgcacaatgacagcttcacttatgctcggcgctatgctgaagggcgatgataagctgaccgtgaaaatcgagggcggaggtccaatcggagctattgtagctgatgccaatgccaaaggagaagtcagagcctatgtctctaacccgcaagttcattttgatttaaatgaacaaggaaagcttgatgtcagacgtgcggttggaacaaacggaacgttaagtgtcgtaaaagatttaggtttgcgcgagttcttcacaggacaagtagaaatcgtttcaggagaattaggagatgatttcacttactatcttgtatcatctgagcaggttccttcatcagtgggcgtaggtgtgctcgtgaatcctgacaataccattcttgcggcagggggctttattattcagctgatgccgggaacagatgatgaaacaatcacaaaaattgaacagcgtctatctcaagtagagccgatttctaagctcatccaaaaagggctgacaccagaagaaattttagaagaagtcctaggcgagaaacctgagattttggaaacgatgcctgtcagattccattgcccttgttcaaaagaacggttcgaaacagccattttaggactaggcaaaaaagaaattcaagatatgatagaagaagatggacaagccgaagcagtatgccatttttgtaatgaaaagtacttatttacaaaagaagagctggaagagcttcgtgaccaaactacccgctaagctctttagcgggtttttaatttgagaaaaggggctgaaagcaggtttgaaatcaagaacaatctggaccattattttaggggcgctgttggtttgctgtattgctgttgcatatacgctgacgaaatcccaagctggcgcatcgtcatccggtgagtctattgcgactatcggaggcaagagtgtgacaagagaagaatggctgaaagaaatggaagatcagtatggtaagtcaacgcttgaagatatgatcaatgtccgagttgttgagcagctggctaaaaagaacaaccttaaaatatccaaaagcgaagttgatcgtgagtttttgctgattaaagcggtcaataattccttttacgaagatgaacatacgacggagaaagagtggaaagaccaaattcgttataatatcctccttgaggaattgttaacaagggatatcgatatctcaaacaaagaattggaatcattctataataaaaataaggaactatatcagtttgatgattcgtatcgaattcggcacattgttgtaaaagatgaagaagaagcgagagaagtcctgaaagaactgaaaggcggatcaagctttgaagctgtcgctgccgaaagatctacagacagatatacatcaccatacggcggagatttaggttttgtcacagaggcatcagacaacattccatcagcatacattgaagaggcgaaaacactcaaagaggatgaatggtctcaggaaccaataaaggtcagcaacggatatgccattatccaactgaaagaaaaactaaaggcaagaacgttctcatttgatgaagtaaagggccagatcagacggcaaatcgcaatggatcagctaggtgataaagcgacagttaagacactttggaaagaagctgatgtatcttggttttatggggaaaaaagtactaagtgattgacaaaaaattttgaaattgatagattatatacataataccaatacaaatagtcggaaattgaggtgtcgagaatggtacgtgtagcaaactccattactgaattaattgggaatacgccaatcgttaaattaaatcgccttgcagatgaaaacagtgcggatgtatatctaaaacttgaatacatgaaccctggaagcagtgtaaaagaccgtatcggtttagccatgattgaagcggctgaaaaagaaggaaaattaaaagccggtgatacaatcattgaaccgacaagcggaaatactggaatcgggcttgcaatggttgctgctgctaaaggattaaaagccattttggttatgcctgatacaatgagcatggagcgccgcaaccttcttcgcgcatacggtgctgagcttgtgctgactcctggtgcggaaggcatgaaaggtgccattaagaaagctgaagagcttgctgaaaagcacggatactttgtgccgcagcagtttaacaacccttctaaccccgaaattcaccgccaaacaacgggtaaagaaatcgttgagcaattcggtgatgaccagcttgacgcatttgtagccggaatcggaacgggcggaacgattacgggagcgggcgaagtgctgaaggaagcatacccttccatcaagatttatgctgttgaaccgtcagattccccagtgctttcaggaggaaaaccaggcccccacaaaattcagggaatcggagcgggattcgtgccggacatcttaaacactgaagtatatgatgaaatcttccctgtgaagaatgaagaagcattcgaatatgcccgcagagctgcacgtgaagaaggaattctcggaggcatctcatcaggtgcggcaatttatgctgctcttcaagtagcaaaaaaactcggaaaaggcaaaaaagtattggccatcattccaagtaacggcgaacgttatctaagcacgccgctgtatcaattcgattaaaaaaagccaaaactcccggtccgccgggagtttttttatatttcgtgcatcaaatatgccatgtctgcgacgaatgttattcttggaagagaaattcacttttttcactaacaacattgctttacaattaaaaacaagtaaaaaagaaaatagaggaatgatacaaatggcacaacgcagaccggcaggcaaaaaaataccttttcaaaaagactcattcttacaacaatttgagaaacttgcgcaatcccggaaacatcatgtacttctcgaaagtgcaagaggcggcagatacagtatagccggtcttgatccaattgcgactgtgaaaggaaaagacggaataactacaattaagcatggtgatgagatgctgtttaaagaaggtgatccattacgggccttccacagctggtttaaaacgctggaaacagaaacaaatcatgagttccctgactttcaaggcggggcaatcgggtttctcagctatgattacgcacggtacattgaaaattttaaaatgctctcattagatgatctagaaacaccagatatttattttcttgtttttgatgatatagcagtttatgaccatcaagaagagtctctatggctgattactcatgttaatggttctgatcaggaaacagcgaatgtgaagctatctgagttagagcagatgtggctgactgagcttcccgctgtctcttcgcgagagatgaaccctgaaacagatggttctttcgcggcgccatttaccgaggatgggttctcgcaagctgtagagaaaatcaaacaatacattgccagcggagatgtgtttcaagtcaatctatcaataaggcagtcacagtcactgtctgcccacccatatcaaatttacaaaaccttgagagaagtaaatccttctccttatatggcgtatttagaaacacctgatttccaaatcatttgcggctcgcctgaactgcttgtcagcaaaaagggcaagctattagagacgagaccgattgcgggcacccgttccagagggaaaacaaatgaagaagacgaggtgcttgcaaacgaattgatacacaatgaaaaagaacgcgcggaacatgtcatgctggttgatcttgagcgaaatgatctgggaagagtatcacggtacgggtctgtgcgcgtaaatgaattcatggcaattgaaaaatactcgcatgtgatgcacattgtgtctaatgtccaaggtgaactgcaggatgggtatgatgctgtagatattattcatgctgtattccccggaggaaccattactggtgcaccgaaagtaagaacgatggaaattatagaagaacttgagccgacacgccgagggctttatactggatctataggatggtttggatataatcacgatctgcagtttaatatcgtcattcgaaccatttatgcaaccggagggcaggcatttatgcagtccggcgcaggagttgtgattgattctgttccgaagcacgaatacaaggaatcattcaaaaaagcttttgcgatgcaaagagcattagagctgagcaaagaagagacaaaaattagatgaggtgagcggagaaatgattttaatgattgataactacgattcattcacgtacaacttggtacagtatttgggcgagcttggggaagagctggttgtgaaacgcaatgacagcatcacaatcgaagaaattgaagaactgtctccggactttctgatgatatctcccggaccgtgcagccctgatgaggcgggaatcagcctcgaagcgattaaacatttcgcagggaaaattcctattttcggtgtatgtctcggacaccagtccatcgcacaagtgttcggtggtgacgttgttagggcagaacggcttatgcacgggaaaacctcggatatcgagcatgacggcaagaccatttttgaagggttgaaaaacccccttgttgcgacgcgataccactcgctgatcgtaaaacctgagacgctgccaagctgttttacagtaacagcacaaacgaaagaaggagaaatcatggctattcgccacaatgacctcccgatagagggcgtgcaatttcacccagagtctattatgacctcctttgggaaagaaatgctcagaaattttattgaaacatatcgcaaggaagttattgcgtgatgatatatgtgaacggccggtatatggaggagaaagatgcagttctttctccttttgaccatgggtttttatatgggatcggtgttttcgaaaccttcaggctctacgaaggctgtccgtttttgcttgattggcatatagaaaggcttgaacgcgcgcttaaggatctgcaaatcgaatatactgtttcaaagcatgagatccttgagatgctggacaagctgcttaagctaaatgatatcaaggatggcaatgcccgcgtcagactgaacatatcagcggggatcagcgataaaggctttgtcgcccagacgtatgataagccgaccgttttatgctttgtgaatcagctgaaaccagaaagccttcctttgcaaaaagaagggaaggttttatcgatacggagaaacactcctgagggatcgttccggttaaaatctcatcattatctaaataatatgtatgcgaaacgggaaattggaaatgatccacgtgtcgagggaattttcctaacggaggatggagctgttgcagagggtatcatatctaatgtcttctggagaaaaggtcgctgtatctatacgccatcgcttgatactggtattctggacggcgtcacgagacgttttatcatagaaaatgcaaagaatatcggcctggagctcaaaacgggccgatatgagccagaagctctcttgacagctgacgaagcgtggatgacgaactcggttcttgaaatcatcccgtttactaaaatagaagaagtaaactatggaagccaaagcggagaagcaacctccgctcttcaattgttatacaaaaaagaaataaagaacatgattcatgaaaagggaggaagagcatggcgcagcacacaatagatcaaacacaagtaatccacactaagcccagcgctttatcatataaagagaagacgctggtgatgggaattttaaacgtaacgcctgactctttctcggacggcggaaaatatgacagcttagacaaggcgctgctgcacgcggaagagatgatcaatgatggtgcccatatcattgatatcggaggggaatcgacaaggcctggcgctgagtgcgtatctgaggatgaggagatgtccagagtcattccggtgattgagcggattacgaaagagcttggtgttcctatttctgtagatacgtacaaggcttctgtcgcagatgaagcagtgaaagccggcgcatccattatcaatgatatttggggtgctaaacatgatccgaagatggcttccgttgcagctgaacataatgttccaattgttctcatgcataaccgccctgaaagaaactacaatgacttattgccggatatgctgtcggacttaatggagagtgtaaaaattgctgttgatgccggagtagacgagaagaacattattcttgatcccggtatcggtttcgcgaaaacctatcacgataacttggcagtgatgaacaaactagagattttcagcgggctggggtatccggttcttctggcaacctcccgaaaaagattcatcggacgtgttctggatcttccgcctgaggagcgggctgagggcacaggcgcgactgtgtgtctcggcattcaaaaaggctgtgacattgtcagggtccatgatgtaaagcaaattgccagaatggcgaaaatgatggacgcgatgctgaataagggaggggtgcaccatggataaagtttatgtagaaggtatggagttttacggatatcacggtgtgttcaaagaagaaaacaaacttggccagcggtttaaagtcgatttaaccgctgagctggatttaagcaaagctggacaaacagacgaccttgagcaaacgatcaactatgctgagctctatcacgtatgtaaagatatcgtggaaggggagcctgtaaaattggtagaaacgctggcggaacgtattgctggcactgttctcgaaaaatttcagcctgttcagcaatgtacggtgaaagtgattaagccagacccgccaattcccggacactataaatcagtagcaattgaaattacgagaaaaaagtcatgaacaacatagcttatattgcacttggatctaatattggagatagagaaacgtatttaaggcaagcagtggcttcactgcatcagcatgctgcggtgacagtcactaaagtgtcgtctatttacgaaactgacccggtcggatacgaagatcaagctcaatttttgaatatggctgttgaaatcaagacatcattgaacccttttgaactccttgaactgacgcagcagatagaaaatgaattaggcagaacaagggaagtaagatgggggccgcggacggcagaccttgacattttgttatttaatcgtgaaaatattgaaacagagcaactaattgttccgcatccgagaatgtatgagcgtttgtttgtccttgcgccgcttgcggaaatttgccagcaggttgaaaaagaggctacaagcgccgaaacagaccaagaaggtgtaagagtatggaagcagaaatctggggtagacgaattcgtgcattcagaaagctgaaaggttatactcaagaaggatttgcaaaagcattaggtatatcagtttctattctcggcgaaattgaacgcggaaaccgattgccgtcagctgccataattcaagatgcagcagatgttttaaatataagtgcggacgaattggcgccgccagaaaaatagaacaaatgaaaggaggagaaaaattgttcaaaatcggagatattcaattgaaaaaccgggttgtgctcgcacctatggctggtgtctgcaactctgcgttcagattgactgtaaaggaattcggagccggattggtatgcgctgaaatggtcagtgacaaagcgatcctttacaacaatgcaagaacaatgggtatgctttatatcgatgaacgtgagaaaccactcagccttcaaattttcggaggaaaaaaggaaacccttgtggaagcggcgaagtttgtagaccaaaacacaactgctgatatcattgacattaacatgggatgtcccgtgccgaagattacaaaatgcgatgcgggagccaaatggcttctcgatcctgataagatttacgaaatggtttctgcagtagtggatgctgttaataaaccagttacagtgaaaatgagaatgggctgggatgaagaccacattttcgcagtgaaaaatgcacaggctgtagaacgtgcgggtggtaaagcagttgcgcttcacggccgtacgagagtgcagatgtacgaaggaacggcaaactgggatatcatcaaagaagtaaaacaatcagtatcgattccggttatcggaaacggcgatgttaagacaccgcaggatgctaagcgtatgctcgatgagacaggagtagacggggtcatgatcggacgcgctgcattgggcaacccgtggatgatttaccgtacggttcagtatcttgaaacaggtgaattaaaagaagagccgcaagtacgcgaaaaaatggccgtatgcaaactgcatcttgaccgcctgattgacttaaaaggtgaaaacgtagcggtaagagaaatgagaaagcacgctgcatggtatctgaaaggcgtgaaaggcaatgcgaacgttcgtaatgaaatcaatcattgcgagacgagagaagagtttgtacagcttttagatgcatttacggttgaagttgaggcaaaagagcttcaaaatgcaaaagtaggataatactcacctctatttgctgctcactgctagttttacgctggcagtttttctgcttttttcatgaaacaatatctgtaatggagtgataacaatgagtcaagaagagcataaccatgaagaattgaatgatcagctgcaagtcagacgcgataaaatgaatcagctgagagataacggcatcgatccattcggcgcacgttttgaaagaactcatcagtctcaagaagttatttcggcatatcaagatctaaccaaagaagagttggaagaaaaagcgattgaagttacaatcgcaggccgcatgatgacaaaacgcggcaaaggaaaagccggctttgcccatcttcaggatttagaaggccaaatccaaatctacgtaagaaaagacagtgtcggtgacgaccaatatgaaatcttcaagtcttctgacctcggtgatcttatcggcgtaaccggaaaagtcttcaaaacaaatgtaggcgaattgtctgttaaagcaacttcctttgaattgctgacaaaagcgcttcgtccgcttcctgacaaataccatggtttaaaagacgttgagcagcgctaccgtcagcgctacctggatcttatcgtaaacccagacagcaaacatacgtttattacacgaagcaagatcattcaagctatgagaagataccttgatgatcatggatacttagaagtagaaacacctacaatgcacagcattcctgggggagcttctgcacgtccgtttatcactcaccacaacgcgttagacattccactctatatgcgtattgctatcgaactgcacctaaaacgtctaattgtcggcggtttagaaaaagtatatgaaatcggccgtgttttccgtaacgaaggtgtctctacacgccataaccctgaatttacaatgattgagttatatgaagcatatgcggactataaagatatcatgagcttaactgaaaaccttgtcgctcatatcgcccaagaagtgcttggcacaactacgattcaatacggggaagagcaaatcgaccttaaaccggagtggaaaagaatccatatggttgacgcagtcaaagaagcgaccggcgttgatttctgggaagaggttactgttgaacaggcgcgtgaatatgcaaaagaacatggagtagaaattaaagactctatgacagtaggccatatcatcaacgaattcttcgaacaaaaaattgaagaaacgcttattcagccaacgtttatttacgggcatcctgtagaaatttctcctcttgctaagaaaaaccctgaggacccgcgttttacagaccgttttgagctgtttatcgttggccgtgaacatgccaacgcgtttacagagctgaatgatcctattgatcaaagagaacgctttgaagcgcaattaaaagagcgtgaagccggtaatgatgaagctcatctaatggatgaagactttgttgaagctctggaatacggtatgccgccaacaggaggtttaggcatcggtatcgaccgtctggttatgctgctgacgaatgccccttctattcgcgatgtgctgttattcccgcaaatgagacaacgctaataaagaagagcggtatcctccatagagaaaggatgccgctctttttaaattccttagtatttcttcaaaaaaactattgcactattatttactaggtggtatattattattcgttgccgctaaacaaggcgataacgaaaaaataacttaaaaaaagttattgacttcactgagtcaacgagttataataataaagtcgcttgaacgaagtgaacaaaatgatctttgaaaactaaacaagacaaaacgtacctgttaattcagtttttaaaaatcgcacagcgatgtgcgtagtcagtcaaactactttatcggagagtttgatcctggctcaggacgaacgctggcggcgtgcctaatacatgcaagtcgagcggacagatgggagcttgctccctgatgttagcggcggacgggtgagtaacacgtgggtaacctgcctgtaagactgggataactccgggaaaccggggctaataccggatggttgtttgaaccgcatggttcaaacataaaaggtggcttcggctaccacttacagatggacccgcggcgcattagctagttggtgaggtaacggctcaccaaggcgacgatgcgtagccgacctgagagggtgatcggccacactgggactgagacacggcccagactcctacgggaggcagcagtagggaatcttccgcaatggacgaaagtctgacggagcaacgccgcgtgagtgatgaaggttttcggatcgtaaagctctgttgttagggaagaacaagtaccgttcgaatagggcggtaccttgacggtacctaaccagaaagccacggctaactacgtgccagcagccgcggtaatacgtaggtggcaagcgttgtccggaattattgggcgtaaagggctcgcaggcggtttcttaagtctgatgtgaaagcccccggctcaaccggggagggtcattggaaactggggaacttgagtgcagaagaggagagtggaattccacgtgtagcggtgaaatgcgtagagatgtggaggaacaccagtggcgaaggcgactctctggtctgtaactgacgctgaggagcgaaagcgtggggagcgaacaggattagataccctggtagtccacgccgtaaacgatgagtgctaagtgttagggggtttccgccccttagtgctgcagctaacgcattaagcactccgcctggggagtacggtcgcaagactgaaactcaaaggaattgacgggggcccgcacaagcggtggagcatgtggtttaattcgaagcaacgcgaagaaccttaccaggtcttgacatcctctgacaatcctagagataggacgtccccttcgggggcagagtgacaggtggtgcatggttgtcgtcagctcgtgtcgtgagatgttgggttaagtcccgcaacgagcgcaacccttgatcttagttgccagcattcagttgggcactctaaggtgactgccggtgacaaaccggaggaaggtggggatgacgtcaaatcatcatgccccttatgacctgggctacacacgtgctacaatggacagaacaaagggcagcgaaaccgcgaggttaagccaatcccacaaatctgttctcagttcggatcgcagtctgcaactcgactgcgtgaagctggaatcgctagtaatcgcggatcagcatgccgcggtgaatacgttcccgggccttgtacacaccgcccgtcacaccacgagagtttgtaacacccgaagtcggtgaggtaaccttttaggagccagccgccgaaggtgggacagatgattggggtgaagtcgtaacaaggtagccgtatcggaaggtgcggctggatcacctcctttctaaggatattatacggaatataagaccttgggtcttataaacagaacgttccctgtcttgtttagttttgaaggatcattccttcgaaacgtgttctttgaaaactagataacagtagacatcacattcaattagtaatacaagatatcacatagtgattctttttaacggttaagttagaaagggcgcacggtggatgccttggcactaggagccgatgaaggacgggacgaacaccgatatgcttcggggagctgtaagcaagctttgatccggagatttccgaatggggaaacccaccactcgtaatggagtggtatccatatctgaattcataggatatgagaaggcagacccggggaactgaaacatctaagtacccggaggaagagaaagcaaatgcgattccctgagtagcggcgagcgaaacgggattagcccaaaccaagaggcttgcctcttggggttgtaggacactctgtacggagttacaaaagaacgaggtagatgaagaggtctggaaaggcccgccataggaggtaacagccctgtagtcaaaacttcgttctctcctgagtggatcctgagtacggcggaacacgtgaaattccgtcggaatccgggaggaccatctcccaaggctaaatactccctagtgaccgatagtgaaccagtaccgtgagggaaaggtgaaaagcaccccggaaggggagtgaaagagatcctgaaaccgtgtgcctacaagtagtcagagcccgttaacgggtgatggcgtgccttttgtagaatgaaccggcgagttacgatcccgtgcaaggttaagcagaagatgcggagccgcagcgaaagcgagtctgaatagggcgcatgagtacgtggtcgtagacccgaaaccaggtgatctacccatgtccagggtgaagttcaggtaacactgaatggaggcccgaacccacgcacgttgaaaagtgcggggatgaggtgtgggtaggggtgaaatgccaatcgaacctggagatagctggttctctccgaaatagctttagggctagcctcaaggtaagagtcttggaggtagagcactgattggactaggggcccctaccgggttaccgaattcagtcaaactccgaatgccaatgacttatccttgggagtcagactgcgagtgataagatccgtagtcgaaagggaaacagcccagaccgccagctaaggtcccaaagtatacgttaagtggaaaaggatgtggagttgcttagacaaccaggatgttggcttagaagcagccaccatttaaagagtgcgtaatagctcactggtcgagtgactctgcgccgaaaatgtaccggggctaaacgtatcaccgaagctgcggactgttcttcgaacagtggtaggagagcgttctaagggctgtgaagccagaccggaaggactggtggagcgcttagaagtgagaatgccggtatgagtagcgaaagaggggtgagaatcccctccaccgaatgcctaaggtttcctgaggaaggctcgtccgctcagggttagtcgggacctaagccgaggccgaaaggcgtaggcgatggacaacaggttgatattcctgtaccacctcctcaccatttgagcaatggggggacgcaggaggatagggtaagcgcggtattggatatccgcgtccaagcagttaggctgggaaataggcaaatccgtttcccataaggctgagctgtgatggcgagcgaaatatagtagcgaagttcctgattccacactgccaagaaaagcctctagcgaggtgagaggtgcccgtaccgcaaaccgacacaggtaggcgaggagagaatcctaaggtgatcgagagaactctcgttaaggaactcggcaaaatgaccccgtaacttcgggagaaggggtgctctgttagggtgcaagcccgagagagccgcagtgaataggcccaggcgactgtttagcaaaaacacaggtctctgcgaagccgtaaggcgaagtataggggctgacgcctgcccggtgctggaaggttaagaggagcgcttagcgtaagcgaaggtgcgaattgaagccccagtaaacggcggccgtaactataacggtcctaaggtagcgaaattccttgtcgggtaagttccgacccgcacgaaaggcgcaacgatctgggcactgtctcaacgagagactcggtgaaattatagtacctgtgaagatgcaggttacccgcgacaggacggaaagaccccgtggagctttactgcagcctgatattgaatgttggtacagcttgtacaggataggtaggagccttggaaaccggagcgccagcttcggtggaggcatcggtgggatactaccctggctgtattgaccttctaacccgccgcccttatcgggcggggagacagtgtcaggtgggcagtttgactggggcggtcgcctcctaaaaggtaacggaggcgcccaaaggttccctcagaatggttggaaatcattcgcagagtgtaaaggcacaagggagcttgactgcgagacctacaagtcgagcagggacgaaagtcgggcttagtgatccggtggttccgcatggaagggccatcgctcaacggataaaagctaccccggggataacaggcttatctcccccaagagtccacatcgacggggaggtttggcacctcgatgtcggctcatcgcatcctggggctgtagtcggtcccaagggttgggctgttcgcccattaaagcggtacgcgagctgggttcagaacgtcgtgagacagttcggtccctatccgtcgcgggcgcaggaaatttgagaggagctgtccttagtacgagaggaccgggatggacgcaccgctggtgtaccagttgttctgccaagggcatcgctgggtagctatgtgcggacgggataagtgctgaaagcatctaagcatgaagcccccctcaagatgagatttcccattccgcaaggaagtaagatccctgaaagatgatcaggttgataggtctgaggtggaagtgtggcgacacatggagctgacagatactaatcgatcgaggacttaaccatatttttgaatgatgtcacatctgttatctagttttgagagaacactctcaatttgtttggtggcgatagcgaagaggtcacacccgttcccataccgaacacggaagttaagctcttcagcgccgatggtagtcggggggttccccctgtgagagtaggacgccgccaagcaattgcacgttagtgcaattatggaggattagctcagctgggagagcatctgccttacaagcagagggtcggcggttcgagcccgtcatcctccaccattatgccggtgtagctcaattggtagagcaactgacttgtaatcagtaggttgggggttcaagtcctcttgccggcaccacttttatatgatataatactcaagtctcttgtagaagagccattagctcagttggtagagcatctgacttttaatcagagggtcgaaggttcgagtccttcatggctcaccattttacgcgggtgtggcggaattggcagacgcgctagacttaggatctagtgtctttatgacgtgggggttcaagtcccttcacccgcattatataggataacagttagaaaaactggacatcctgtctgcggaagtagttcagtggtagaacaccaccttgccaaggtgggggtcgcgggttcgaatcccgtcttccgctccaactataccatccacgccggggtggtggaattggcagacacacaggacttaaaatcctgcggtaggtgactaccgtgccggttcaagtccggccctcggcattatgttttgcgcccgtagctcaattggatagagcgtttgactacggatcaaaaggttaggggttcgactcctctcgggcgcgccatattttttaatagaatagatgggaaatcgggaagtagctcagcttggtagagcacatggtttgggaccatggggtcgcaggttcgaatcctgtcttcccgaccattttttatggggccttagctcagctgggagagcgcctgctttgcacgcaggaggtcagcggttcgatcccgctaggctccaccaaaagttttttaaaaaagttgttgactttgaagaagtgacgttgtataatgataaagttgctttaacaaagcagacaaacaaaatgatctttgaaaactaaacaagacaaaacgtacctgttaattcagtttttaaaaatcgcacagtgatgtgcgtagtcagtcaaactactttatcggagagtttgatcctggctcaggacgaacgctggcggcgtgcctaatacatgcaagtcgagcggacagatgggagcttgctccctgatgttagcggcggacgggtgagtaacacgtgggtaacctgcctgtaagactgggataactccgggaaaccggggctaataccggatggttgtttgaaccgcatggttcaaacataaaaggtggcttcggctaccacttacagatggacccgcggcgcattagctagttggtgaggtaacggctcaccaaggcaacgatgcgtagccgacctgagagggtgatcggccacactgggactgagacacggcccagactcctacgggaggcagcagtagggaatcttccgcaatggacgaaagtctgacggagcaacgccgcgtgagtgatgaaggttttcggatcgtaaagctctgttgttagggaagaacaagtaccgttcgaatagggcggtaccttgacggtacctaaccagaaagccacggctaactacgtgccagcagccgcggtaatacgtaggtggcaagcgttgtccggaattattgggcgtaaagggctcgcaggcggtttcttaagtctgatgtgaaagcccccggctcaaccggggagggtcattggaaactggggaacttgagtgcagaagaggagagtggaattccacgtgtagcggtgaaatgcgtagagatgtggaggaacaccagtggcgaaggcgactctctggtctgtaactgacgctgaggagcgaaagcgtggggagcgaacaggattagataccctggtagtccacgccgtaaacgatgagtgctaagtgttagggggtttccgccccttagtgctgcagctaacgcattaagcactccgcctggggagtacggtcgcaagactgaaactcaaaggaattgacgggggcccgcacaagcggtggagcatgtggtttaattcgaagcaacgcgaagaaccttaccaggtcttgacatcctctgacaatcctagagataggacgtccccttcgggggcagagtgacaggtggtgcatggttgtcgtcagctcgtgtcgtgagatgttgggttaagtcccgcaacgagcgcaacccttgatcttagttgccagcattcagttgggcactctaaggtgactgccggtgacaaaccggaggaaggtggggatgacgtcaaatcatcatgccccttatgacctgggctacacacgtgctacaatggacagaacaaagggcagcgaaaccgcgaggttaagccaatcccacaaatctgttctcagttcggatcgcagtctgcaactcgactgcgtgaagctggaatcgctagtaatcgcggatcagcatgccgcggtgaatacgttcccgggccttgtacacaccgcccgtcacaccacgagagtttgtaacacccgaagtcggtgaggtaaccttttaggagccagccgccgaaggtgggacagatgattggggtgaagtcgtaacaaggtagccgtatcggaaggtgcggctggatcacctcctttctaaggatattatacggaatataagaccttgggtcttataaacagaacgttccctgtcttgtttagttttgaaggatcattccttcgaaacgtgttctttgaaaactagataacagtagacatcacattcaattagtaatacaagatatcacatagtgattctttttaacggttaagttagaaagggcgcacggtggatgccttggcactaggagccgatgaaggacgggacgaacaccgatatgcttcggggagctgtaagcaagctttgatccggagatttccgaatggggaaacccaccactcgtaatggagtggtatccatatctgaattcataggatatgagaaggcagacccggggaactgaaacatctaagtacccggaggaagagaaagcaaatgcgattccctgagtagcggcgagcgaaacgggattagcccaaaccaagaggcttgcctcttggggttgtaggacactctgtacggagttacaaaagaacgaggtagatgaagaggtctggaaaggcccgccataggaggtaacagccctgtagtcaaaacttcgttctctcctgagtggatcctgagtacggcggaacacgtgaaattccgtcggaatccgggaggaccatctcccaaggctaaatactccctagtgaccgatagtgaaccagtaccgtgagggaaaggtgaaaagcaccccggaaggggagtgaaagagatcctgaaaccgtgtgcctacaagtagtcagagcccgttaacgggtgatggcgtgccttttgtagaatgaaccggcgagttacgatcccgtgcaaggttaagcagaagatgcggagccgcagcgaaagcgagtctgaatagggcgcatgagtacgtggtcgtagacccgaaaccaggtgatctacccatgtccagggtgaagttcaggtaacactgaatggaggcccgaacccacgcacgttgaaaagtgcggggatgaggtgtgggtaggggtgaaatgccaatcgaacctggagatagctggttctctccgaaatagctttagggctagcctcaaggtaagagtcttggaggtagagcactgattggactaggggcccctaccgggttaccgaattcagtcaaactccgaatgccaatgacttatccttgggagtcagactgcgagtgataagatccgtagtcgaaagggaaacagcccagaccgccagctaaggtcccaaagtatacgttaagtggaaaaggatgtggagttgcttagacaaccaggatgttggcttagaagcagccaccatttaaagagtgcgtaatagctcactggtcgagtgactctgcgccgaaaatgtaccggggctaaacgtatcaccgaagctgcggactgttcttcgaacagtggtaggagagcgttctaagggctgtgaagccagaccggaaggactggtggagcgcttagaagtgagaatgccggtatgagtagcgaaagaggggtgagaatcccctccaccgaatgcctaaggtttcctgaggaaggctcgtccgctcagggttagtcgggacctaagccgaggccgaaaggcgtaggcgatggacaacaggttgatattcctgtaccacctcctcaccatttgagcaatggggggacgcaggaggatagggtaagcgcggtattggatatccgcgtccaagcagttaggctgggaaataggcaaatccgtttcccataaggctgagctgtgatggcgagcgaaatatagtagcgaagttcctgattccacactgccaagaaaagcctctagcgaggtgagaggtgcccgtaccgcaaaccgacacaggtaggcgaggagagaatcctaaggtgatcgagagaactctcgttaaggaactcggcaaaatgaccccgtaacttcgggagaaggggtgctctgttagggtgcaagcccgagagagccgcagtgaataggcccaggcgactgtttagcaaaaacacaggtctctgcgaagccgtaaggcgaagtataggggctgacgcctgcccggtgctggaaggttaagaggagcgcttagcgtaagcgaaggtgcgaattgaagccccagtaaacggcggccgtaactataacggtcctaaggtagcgaaattccttgtcgggtaagttccgacccgcacgaaaggcgcaacgatctgggcactgtctcaacgagagactcggtgaaattatagtacctgtgaagatgcaggttacccgcgacaggacggaaagaccccgtggagctttactgcagcctgatattgaatgttggtacagcttgtacaggataggtaggagccttggaaaccggagcgccagcttcggtggaggcatcggtgggatactaccctggctgtattgaccttctaacccgccgcccttatcgggcggggagacagtgtcaggtgggcagtttgactggggcggtcgcctcctaaaaggtaacggaggcgcccaaaggttccctcagaatggttggaaatcattcgcagagtgtaaaggcacaagggagcttgactgcgagacctacaagtcgagcagggacgaaagtcgggcttagtgatccggtggttccgcatggaagggccatcgctcaacggataaaagctaccccggggataacaggcttatctcccccaagagtccacatcgacggggaggtttggcacctcgatgtcggctcatcgcatcctggggctgtagtcggtcccaagggttgggctgttcgcccattaaagcggtacgcgagctgggttcagaacgtcgtgagacagttcggtccctatccgtcgcgggcgcaggaaatttgagaggagctgtccttagtacgagaggaccgggatggacgcaccgctggtgtaccagttgttctgccaagggcatcgctgggtagctatgtgcggacgggataagtgctgaaagcatctaagcatgaagcccccctcaagatgagatttcccattccgcaaggaagtaagatccctgaaagatgatcaggttgataggtctgaggtggaagtgtggcgacacatggagctgacagatactaatcgatcgaggacttaaccatatttttgaatgatgtcacatctgttatctagttttgagagaacactctcaatttgtttggtggcgatagcgaagaggtcacacccgttcccataccgaacacggaagttaagctcttcagcgccgatggtagtcgggggtttccccctgtgagagtaggacgccgccaagcaagcttaaacccagctcaatgagctgggttttttgtattttggtttattggtatcataaaattccacttaactgtataatataataactttataccgaattttaaatcagcaatcaggttttgtggaccgggaaaatggaaataatgaaggatagagcgagaaagttgaaaattctcgagaaacggcttatagtaagattaaagtcaaatatagtcaaagtcagtaaaggagggggttgagtgggacataatatttctgacatcattgaacaatatttaaaacgagtgttagatcaaaatggcaaggaaattttagagattaaacgaagtgaaattgcagataaatttcaatgcgttccttcccaaataaattatgtcatcaacaccagatttacaagcgaaagaggatatattgttgagagcaaacgcgggggtggcggttatatcagaatcattaaaattaaaatgaacaatgaagttgtcctgatcaataatattatttctcaaattaatacccatttgtctcaagcagcctctgatgacattattttaaggctattagaagacaaggtaatttcagaaagagaagcaaaaatgatggtcagcgtaatggaccgctcagttttacacattgacttgcctgaacgtgatgaattaagagcgagaatgatgaaggcaatgctgacttctttaaaattaaaataagcgggtgaaaagattgatttgtcaagagtgccacgagagaccagccacttttcactttacaaaggttgttaacggagaaaaaatagaagttcatatttgtgaacaatgtgccaaagaaaatagtgattcatatggtataagtgcaaatcagggtttctctattcataatttactttcgggtttactgaacatggattcttcatttcaaaatgcaggaactcaaatgttcagtcactcggagcaaatatctgcttgtccgaaatgcggaatgacttttcagcaattcagaaaaattggccgttttggatgttctgaatgttacaaaacatttcatagcaacattacacctatcctacgtaaagtgcacagcggaaacactttgcatgcagggaagataccgaaacgaataggcggcaatcttcatgtcagacggcagattgatatgctaaaaaaggaattagaatccttaatccatcaagaagaatttgaaaatgcagctcatgtaagagatcaaattcgttcattagaacaatcactcaaaagtacagatagtgaggaggaacaggagtaatgtcgctaaagcattttattcaggacgcactaagcagttggatgaagcagaaaggacctgaaagtgacattgtactcagcagccgcatacgtttagcaaggaactttgagcatattcggttccctacgcggtattccaatgaagaagcctcatccatcatacagcaatttgaagatcagttttcagagcaagaaattcccggaatcggcaaatttgttttgattagaatgaatgatgcacagcctttagaaaagcgtgtacttgttgaaaaacatctaatcagtcctaatctgacagagtctccttttggcggctgtttgctttctgaaaatgaggaagtaagtgtcatgttaaatgaagaggaccatattagaattcagtgtcttttccctggatttcagcttttagaagcaatgaaagccgcaaaccaggtcgacgactggattgaagaaaaagttgattatgcattcaatgagcaaagaggatacttaaccagctgtcctacaaacgtaggtacaggtttaagggcttcggtcatgatgcatctgccggcactggttttaactaggcaaataaatcgaattataccggcaattaatcaattaggcttagttgttagaggaatttatggggaaggcagcgaagcagtagggaatatctttcaaatttcaaatcagatcacgcttggtaagtcagagcaggatattgtagaggatcttaacagtgttgctgctcagttgattgaacaagaacgatctgcccgagaagcgatttatcaaacttctaaaatcgaacttgaggatcgggtatatcggtcttatggggtcttgtctaattgccggatgatagaatcgaaagaaactgcaaagtgcctttcagatgttcggttaggcatagacctaggcattataaaaggactttcaagcaacatacttaacgaacttatgattttgacgcagccaggatttttacagcaatactcgggaggcgctttgcgtccgaacgaaagggacattcgaagagcggctctcatcagagaacggcttcacttagaaatgaatgggaaacgacaggaggatgaatcgatatgatgtttggaagatttacagaacgagctcaaaaagtactggcgctagcacaggaagaagcacttcggttaggtcataataacattggcactgagcatattttattaggactggtaagagaaggagagggcattgctgctaaagctcttcaagcgcttggactcggttcagataaaattcagaaagaagtagaaagtttgatcgggcgcgggcaggaaatgtctcaaacgattcattatactcctagagctaaaaaagtcattgagctttcaatggatgaggcaagaaaactcggtcattcttatgttggaacagaacatattcttcttggactgattcgtgaaggagaaggtgttgctgcgagagttttgaataatctcggtgtcagcttaaataaagcaagacagcaggtgctccagcttctaggaagtaatgaaacaggatcatcagcggcaggaacaaacagcaatgcgaatacgcctacgcttgacagcttggcaagagacttaactgctattgcgaaggaagacagccttgaccctgtaatcggcagaagcaaggagatccagcgtgtcattgaagtattaagccgcagaacgaaaaacaaccctgttctcattggggaaccaggtgtaggtaaaacggctatcgcagaaggtttggcacagcaaattatcaataatgaagtacccgaaattttgcgtgataaacgtgtgatgacattagacatgggaacagttgttgccggcacaaaatatcgcggagaatttgaggatcgcctgaagaaggtcatggatgaaattcgccaggcaggaaatatcattctattcatcgatgagctccatacattaatcggggcaggcggagcagaaggtgctattgatgcatctaatattttaaaaccttcacttgctcgcggcgaactccaatgtattggtgcaacgactcttgatgagtaccgtaaatatattgaaaaagatgcagcactggaacgccgttttcagccgattcaggttgatcagccatctgtagatgaaagtattcaaattttacaaggtctgcgtgacagatacgaagcccaccaccgcgtttctatcactgatgatgccattgaagctgcggttaagctttctgacagatatatttctgaccgcttccttccggataaagcaattgacttgatcgatgaagcaggttcaaaggtgagactgcgctcatttacaacgcctcctaacttaaaagagcttgagcagaagcttgatgaggttcgtaaagagaaggatgcggcagtgcaaagccaagagtttgaaaaagctgcttccttgcgtgatactgaacaacgcctgcgcgagcaagtagaggatacgaagaaatcatggaaagagaagcaagggcaggaaaactcagaggttactgtggatgatattgcgatggttgtatccagctggaccggtgtgcctgtatctaaaatcgcccaaactgaaactgataagcttctcaatatggaaaacattcttcattcccgcgtcatcggccaggatgaggcagttgtagctgttgcaaaagccgtcagacgtgcgagagcagggttgaaagatcctaaacgcccaatcggctcattcattttcttaggccctacaggtgtaggtaaaacagaacttgcacgagcacttgctgaatccatttttggcgatgaagaatccatgatcagaattgacatgtctgaatacatggaaaaacactcaacttcaagacttgttggttcacctccgggatatgtgggatatgatgaaggcggtcaattgacagagaaagtcagaagaaaaccttactctgtcgtgcttcttgatgagatcgagaaagcgcaccctgatgtcttcaatatccttctgcaagttcttgaagacgggcgattgactgattctaaaggacgcacagtcgatttccgcaataccattctgatcatgacatcaaacgtcggagcaagtgagctgaaacgcaataaatatgtcggctttaacgttcaggatgaaactcaaaatcataaagacatgaaagataaagtgatgggtgaattgaaacgagcgttcagacctgagttcatcaaccgtattgatgaaatcattgtcttccattcacttgagaaaaaacatcttactgaaattgtgtcattaatgtctgatcaattaacgaaacgcctgaaagaacaagatctttctatcgaattgacagatgctgcaaaagcgaaagtcgcggaagagggcgttgacctggaatacggtgcccgtccgttaagaagagcgatccaaaaacatgtcgaggatcgtttatctgaagaactcctcagaggaaatattcataaaggacagcatattgttcttgatgtagaagatggcgaatttgtcgtaaaaacgactgctaaaacgaattaatatagaagacggaaatgaggcatacagcatgtaagtgtatgcctcactttcatatcaagaaatagaacaagggagaggtcttacactatatatggctaaaacaaaatcgaaattcatctgccaatcctgcggctacgagtctccaaaatggatggggaaatgtccgggctgcggtgcttggaatacaatggtggaagaaatgattaaaaaagcaccggccaatcggagagcggctttttctcattctgttcaaactgtacagaaaccttcacctattacatcaatcgaaacatcagaagaaccccgcgtcaaaacccagcttggcgagtttaacagagtactcggcggaggtgtcgttaaaggctccctcgttttaattggcggtgatcctggtatcggaaagtcaacgctattactgcaggtttccgctcaattatcaggctcatcaaacagtgtcctgtatatttcgggagaagaatctgtaaagcaaacgaagctgcgagcagaccgtctcggcattaataatccgtcactgcatgttttatctgaaaccgatatggagtatatttcgtctgctatacaagagatgaatccagcgtttgtcgttgttgactctattcaaacggtttaccaaagcgatattacatcggctccaggcagtgtgtcacaggtcagagaatgtaccgctgagctgatgaaaattgcaaaaacaaaaggtattccgatttttatcgtagggcacgtaacgaaagaagggtctattgcaggtccaagactgttggagcatatggttgacactgttttatattttgaaggagaacgccaccatactttccgtattttgcgggctgtaaaaaaccgtttcggatctacaaacgaaatgggcattttcgaaatgcgggaagaggggctcactgaggttttgaatccttcggaaattttcttagaagaacgctctgctggttccgcaggctcgagtatcactgcctctatggagggcactagaccgattctcgttgaaattcaggcgctcatctcgccaacaagctttggcaacccaaggcgtatggcaacgggaatagaccataacagggtctctctgttaatggctgtgttagaaaaaagagttggactgctgctgcaaaatcaggatgcttatttgaaagtggctggcggcgttaagcttgatgaaccggcaattgatcttgccattgcgattagtatcgcatcaagctttagagacacacctccaaatcctgcagattgttttattggagaagtgggattaaccggagaagtccggcgggtttcaagaattgaacagcgtgtgaaagaagcggcaaagcttggttttaaacgcatgatcatacccgcggcaaatctggatggatggacaaaaccaaaagggattgaggttatcggagtagcaaatattgcagaagcgcttcgtacttcattaggaggataatagatggaaaaagagaaaaaaggggcgaaacacgagttagacctgtcatctatattgcagtttgttgctccgggtacaccgctcagagcggggatggaaaacgtcttgagagcaaatacaggcggtctgattgttgttggatataatgataaagtaaaagaagtggtggacggcggctttcacataaacacggctttttctccggcgcatttatatgagctggctaaaatggatggagcgatcattttaagtgattctggtcaaaagatcctctacgcgaatactcagctgatgccggatgccacaatttcttcatcagaaacaggaatgcggcacagaactgccgaaagagtagctaagcaaactggctgtcttgtaatcgctatttctgaaagaagaaatgtcataacgttatatcaggaaaacatgaagtatacactaaaagacataggatttattttaaccaaggcgaaccaagccattcaaacacttgaaaaatataagacaatcctcgataaaacgattaatgcactgaacgcgttagagtttgaggaacttgttaccttcagtgatgtcttgtctgtcatgcatcgttatgaaatggtactgagaatcaaaaacgaaattaatatgtatatcaaagagctggggacagaagggcatctgatcaaactgcaagtcattgaattgattacggatatggaagaagaggccgctttatttattaaggactatgtaaaagaaaagattaaagatccgtttgttctcttgaaggagctgcaggatatgtccagttatgatctgctggatgattccattgtgtataagcttctcggttaccctgcttctactaatcttgatgattatgtattgccgagaggatacaggctgttaaataagataccgcgtcttccgatgccgattgttgaaaatgttgtagaagcatttggagtcctgccaaggattattgaggcgagtgcagaagaattagatgaagtagagggaatcggtgaagtacgagcccaaaaaatcaaaaaaggattaaaacgcctgcaagagaagcattatttagacagacaactgtgatttcggttaaaaccttatgaatacgggtatattaatgttggtttttgtttattctgatattcgtaggatgcataagactttgtgaaattaaaatgttaaaaaaggaggtgggggtatgttaaaacgaatagttcaggcgttcttcattatttttggcggcgttgttggtatatttttgatacctgaattgtttgtactgttaaatatacaggacatacctttaataacaaacgcatatacgtctgcggcaataggagcaattatcttttttctcatcagtatatggggtacagaatacgttgtgaactgggtgaagtggatagaggattcattgttaaaagcgccggttccagatttgttatttggaagtcttggcttagtttttggacttataattgcttatcttatcgtaaatgttattcctttagacaatataccttaccgcatattcagcacaataattcctgtatttttggctttcttcctcggttatctcggcttccaggtgggctttaagaaaaaggatgaattgatcagcctgttttccatttccgccagaatgcaaaagaaaaaaggaacagctgatgaagaacatgaggttcaagacaagaagctgaaaattttggacactagtgttattattgatgggagaatagcagatatttgtcagactggttttttagagggagttatcgtgattccgcagtttgtccttgaggaattgcagcatattgcagactcttcagatgttttaaaacgaaacagaggacgccgcggtcttgatatcctgaaccgcattcagaaagaattagacattgaagttgaaatttacgaaggcgactttgaagatattcaggaggttgacagcaagctcgtcaaacttgctaagctgacatccggggtcgttgtgacgaatgattttaatttaaataaagtgtgcgagcttcagaaggtagcagtattaaacattaatgaccttgccaatgcggtcaagcctgttgtgcttcctggcgaggaaatgaatgttcaggtcattaaggacgggaaagagcataatcagggagttgcctacttggatgacggtacgatgattgtcgttgaagaaggacgaaattatatcggcaagcatattgatgtactcgtcacaagtgtgctgcagacagcagcgggacgaatgatttttgcgaagcctaagctgttggagaaggcgctgtaaagggagaagaaacaatgagttatgatgtggtgattcctgcagccggacagggaaagcggatgaaggcagggagaaataaactgttcattgatctgaagggagacccggtgatcatacacacgttaagagtgtttgacagccaccggcagtgcgataaaatcattttggtgattaacgagcaggagcgggagcactttcaacacttgctgtccgattacccgttccaaacttcaattgagcttgttgcaggcggagaagagcgtcagcacagtgtgtataaggggctgaaagccgtaaagcaggaaaagattgtccttgtacatgacggtgcccgcccatttataaaacatgaacaaattgacgaactgatcgcagaggcggaacagacaggagcggccatccttgctgttccggtaaaagatacgattaaacgcgttcaagatttacaagtcagtgagacgattgaacgttcaagcttgtgggctgtccaaacgccacaagcttttcgtctttctttattgatgaaggctcacgctgaggccgagcgcaagggatttttagggacggatgacgccagcctcgttgaacagatggagggcggttcggtccgtgttgtagaaggcagctatacaaatattaagctgacgacgccagacgatttgacgtcagctgaagctatcatggaatcagaaagtgggaataaacatgtttagaattggacaaggatttgatgtgcatcaattagtggagggccgtcctctcattattggcggaattgaaatcccgtacgaaaaagggctgcttggccattctgatgcagacgtattgctgcatactgtcgctgacgcctgcctgggagctgtgggtgaaggagacatcggcaagcattttcctgacacagatcccgagttcaaggacgcagattctttcaaattacttcagcatgtctggggaatcgtgaaacagaaggggtatgtccttgggaacattgattgcaccatcatagcgcaaaagccgaagatgctgccgtacatagaagatatgagaaaaagaattgctgaaggccttgaggcagaagtttctcaagtaaatgtaaaagcaacaacgacagaaaagcttggatttacaggccgggcggaaggaatagcggctcaggcgacagtactgatacaaaaaggctaacttgttttgatgccgggtctatttggtggtagaatagattcatacatttttgcctgaggccatacatgacatgaaaggaagtatttgaaaatgggaaacgaagtacgcgtccgttatgcaccgagtccaaccggacatttgcatattggaaatgccagaacggcgctttttaattatttatttgcccgcaatcaaggcggtaagtttatcattcgagttgaggatacagataaaaagcgcaatattgagggcggagaacaaagccagctgaattatctgaagtggctaggtattgactgggatgagagtgtggatgtcggaggagagtacggcccataccgtcagtcagagcgtaacgatatctataaagtgtactatgaagagcttcttgaaaaagggcttgcttataaatgttactgtacggaagaagagcttgaaaaagagcgtgaagaacagattgcccgcggagaaatgcctcgttattccggaaaacacagagacctgactcaggaagaacaggagaaatttatcgctgaaggcagaaaaccaagtattcgtttccgcgtgccggaaggaaaaatcatcgccttcaatgatatcgtaaaaggcgaaatttcttttgaatcagatggcatcggcgactttgttattgtgaaaaaggacggtacgccgacttacaacttcgcggtagcgattgatgactacttaatgaaaatgacacacgtgctgcgcggtgaggatcatatttctaacacaccgaaacagattatgatttatcaagcattcggatgggatattcctcagttcggacacatgacgctgatcgtaaacgaaagccgtaaaaagctcagtaaacgtgatgaatccattattcaattcatcgagcagtacaaagagcttggctacctgccagaagcactgttcaactttatcggcctgttaggctggtcaccggttggagaagaagagcttttcacaaaagagcagtttattgaaatttttgatgtaaatcgtttatctaaatcaccagctttgtttgatatgcataagctaaaatgggttaacaaccaatatgtgaagaagctggatcttgatcaggttgttgaattgacgcttccgcatttgcaaaaagccggcaaagttggcactgagctttctgctgaagaacaagaatgggttcgtaaactgatttccctgtatcatgagcaattaagctacggtgcggaaattgttgagctgactgatttgttctttacggatgagatcgagtataatcaagaagcgaaagctgttctggaagaagaacaggttcctgaagtgctcagtacattcgcagcgaagcttgaagagcttgaggagttcactccggataacatcaaagcatcgatcaaagcagtgcagaaagaaactggccataaagggaaaaaactgtttatgccgattcgtgttgctgtaacagggcaaactcatggtccggaactgccgcaatcaattgaattgatcggtaaagagactgcaattcagcgtttaaagaatatctaaataaatgattgttgacagggaagagtataaagctttaggccattacagaaaggatctccattggctgagagagatccatgagccgggttttagaagtgcgcccttaagacctttgaagaacgttttttgaaatcagtattcaaaggcggccgccgccgttacaggctgaagttgggagagcagaagtctgcttttcaaacagagtggaaccgcgcggttaaagcgtctctgtcatgtttacatgcagaggcgctttttttattgggtagaggaaatcagatagagaaacggggggaagcatgtgttttttagaatgctcaaagaagacattgatactgtgttcgatcaagatcccgcagcaagaagctattttgaagtgattttaacttattccggtttacatgctatatgggcgcatcggattgcacatgctttatataaacgaaaattttatttccttgcacgccttatatctcaagtaagccgattttttaccgggatagaaatccaccccggcgccacaatcgggagaagatttttcatagaccacggcatgggggttgtcattggggagacatgtgaaatcgggaataacgttaccgtttttcagggggttaccctcgggggaacggggaaagaaaagggaaaaaggcacccaacgattaaagatgacgcattgatagccacaggtgctaaagtgctcggttctattacggtcggtgaaggctcaaagattggggctggttcagtagtgctgcatgatgttcctgatttttcaacagttgtcggtatccctggacgggtcgttgtacaaaatggcaagaaagtaagacgcgatttaaaccatcaggatttgcccgatccggttgctgaccgctttaagtctttggaacagcagattttagagctgaaggcagaacttgaagacagaaaagaaaggatcaaccaaaaatgacaatcacactttataatacattgactagacagaaggaaacattcgttcctcttgaagagggaaaagtgaaaatgtatgtatgcggacccacggtttacaattacattcatatcgggaacgcgcgtccggcaatcgtttacgatacggttcgaaactatttagagtataaaggctatgatgtgcagtatgtctctaacttcacagacgtagacgataaactaattaaagcggcaaatgaactcggtgaggatgtacccaccatttcagagcgttttattaaagcatactttgaagacgtaggtgcgctcggctgccgaaaagccgaccttcatccgcgagtaatggagaacatggatgccattatcgaattcgtagatcagctcgtgaaaaagggctacgcatatgaatcagaaggtgacgtatatttcaaaaccagagcgtttgaagggtacggaaagctttctcagcaatcaatcgatgaacttagatcaggtgcacgcatccgagtcggcgagaaaaaagaagatgctcttgatttcgcactgtggaaagcggcaaaagaaggagaaatctcttgggatagcccttgggggaaaggacgtccgggctggcacattgaatgctcagcaatggtgaaaaagtatctcggtgaccagattgatatccatgcgggcggacaggatttaacattccctcaccatgaaaacgaaattgcgcaatctgaggcgctaacaggcaaaacgtttgcgaagtattggcttcataatggttatatcaatattgataatgaaaaaatgtcaaaatcactaggcaactttgtgcttgtgcatgacatcattaaacagcatgatccgcagcttttgagattctttatgctatctgttcattatcgccatccgattaactattcagaagagcttctggagaatacgaaaagcgcgttcaaccgtttaaaaacagcgtacagcaatcttcagcaccgtctgaacagcagtacgaatttaaccgaagatgacgatcaatggcttgaaaaagttgaagaacaccgcaaagcattcgaagaagcgatggacgatgattttaatacggcgaatgccatttcagtcttgtttgacttagcgaaacacgccaattattatcttcagaaagatcatacggctgatcatgtgattacggcgtttattgagatgtttgaccgcattgtttctgtcctcggtttttcgttgggtgagcaggaacttctcgatcaagagattgaagacttaatcgaaaagcgaaatgaagcgcgccggaatcgcgattttgcattgtcagaccagatccgcgaccagctgaaaagcatgaatatcattcttgaagatacggctcaaggcactcgctggaaacggggagaataacagatgcttgaatttgatacgataaaagattctaagcagcttaacggtcttgcgcttgcttatataggtgatgccatttttgaagtgtatgtcaggcatcacctgcttaagcagggctttaccaaaccaaatgatcttcataagaaatcaagccggattgtttcagcaaagtcacaggctgagatcctattttttctgcagaatcaatcattttttacggaagaagaggaagcggtgctgaaaagaggcagaaatgccaagtcagggacaacacctaaaaatacagatgttcagacgtaccgctacagtacagcatttgaagcgcttctgggctacctttttctagagaaaaaagaggaacgacttagtcagctcgtagccgaagctatacaattcgggacgtcagggaggaaaacaaatgagtcagcaacatgattacgtcatagggaaaaatgcagtgatcgagacgttaaaatctgatcggaagctgtataagctgtggatggcggaaaacaccgtaaagggacaagcacagcaagtgattgagcttgccaaaaagcagggaatcacgattcaatacgtcccgagaaaaaaactcgatcaaatggtgacaggacagcatcagggcgtagtggcacaggttgcagcgtatgaatatgcagaactggacgatttatataaagcagccgaagaaaaaaatgaacagcctttcttcctcattctggacgagcttgaagaccctcataatcttggttccattatgaggacagcagatgcggtcggcgctcatggcatcgtcattccaaaacggagagctgtcgggctgacaacaacagtggcaaaagcttcaacaggagcaattgagcacattcctgtagcaagagtcaccaatttggcacggacgttagaagagatgaaagagcggggaatctgggttgtcggaacggatgcgtccgcgcgtgaggattaccgtaatatggacggcaatatgcctttggctctagtcatcggaagtgaaggaaaagggatgggccgccttgtgaaagaaaagtgcgattttctcattaaactcccgatggccggaaaggtaacttcactaaatgcatctgtcgcggctggtcttttgatgtatgaagtctaccggaaacgaaaccctctgggagaataaagacccatggatatcctgttagtagacgggtacaacatgattggagcctggccgcagctgaaggatttaaaagcgaacagttttgaagaggcgagagacgtactgattcagaaaatggcggaatatcaatcgtatacaggaaacagggttattgttgtttttgacgcgcatctcgtaaaagggcttgagaaaaaacagaccaaccatagagttgaagtaatttttacaaaagaaaatgagacggctgatgagcggatagaaaagctcgctcaggctttgaataatattgcgactcaaattcacgttgcgacctctgactatactgagcagtgggcgattttcggacagggggcattgcggaaatcggcccgggagcttttgagagaggtagaaacgattgaaaggcgaatagagagacgggtaagaaaaatcacttccgaaaagccggcgggtaaaattgctttatcggaagaggttttgaaaacgtttgaaaagtggaggcggggagacttagattaagttgacgcttttttgcccaatactgtataatatttctatctacgtgcgccggggggatcggagtgaatctacagaacaacaagggaaaattcaacaaagagcagttttgccagttggaggacgagcaggtcattgaaaaggttcatgttggggacagtgatgcgttagattacttgattacgaagtaccgaaactttgttcgggcaaaagcaagatcctatttcttaataggggcggacagagaggatattgttcaggaaggcatgataggcctctataagtctattcgtgacttcaaagaggacaagcttacctcattcaaagctttcgcagaattatgtattacccgccaaattattaccgcaataaagacagctactcgccagaaacacattcctttgaattcctacgtctcattagataaaccgatttttgatgaagaatcagaccgaacgctgctggatgtcatttcaggagcgaaaaccttaaatcctgaggaaatgatcattaatcaggaagaatttgatgatattgaaatgaaaatgggagaactattaagtgatttagagagaaaagtactcgtcttatatctcgacgggagaagttaccaagagatttctgatgaactgaaccgacatgtgaaatcgatcgacaatgcccttcagcgtgtgaaacgcaagctggagaagtacttggaaattcgcgaaatcagtttgtaataggaatttatgctatattgacagtatttttctgactatgatatgttactaaagataagaactaatgtctatttagaaaaaggtgtaatgacatgagaaaaaagattacgttagcatgcaagacatgcggaaaccgtaattatacgacaatgaagagctctgcatcagcggctgagcgattagaagtaaagaaatactgcagtacttgcaattcacatacagctcatcttgaaacaaaatagtttttgcgcttttaaattgtggaggtcttttacatgcgtattatgaaattctttaaagatgttgggaaagaaatgaaaaaggtaagctggcctaaaggaaaagagttaacgcgttataccattacggtaatttcaacagttatcttttttgttatcttttttgccctccttgacacaggaatttctcaattaattcgtttaatagttgaataatgatcagcaatacgtgctataatagatcataatattacttgccaaaacccgttcagcgggttttttattgtggcttaaaatgaaagttatcataggcttgccgcctattttttgaagcgttatggtaattcactaaaaccaaatgcggggagggaaggactggacagtcctgaatagaatggaaaagaattggtatgttgttcacacgtactctggttatgagaataaagtaaaagccaacttggaaaagcgtgttgaatcaatggggatgcaggataaaattttccgtgtagtcgtacccgaagaagaagaaacggatatcaaaaacggcaagaaaaaagtcgtgaaaaagaaagtattccctggttatgtgcttgttgaaattgtaatgacagacgactcttggtatgtcgtccgcaacacgccgggcgttactggattcgtaggatctgccgggtcaggttcaaaaccgacgccgcttcttccgggggaagcagaaaccattctgaagagaatgggcatggatgaacgaaaaactgatattgactttgaactgaaagagacagtgaaagtgatagacggaccttttgctaactttacaggatcaattgaagagattgattatgataaaagcaaggtcaaagttttcgttaatatgtttggccgtgaaacgccggttgagctggaatttacccaaatcgataaattgtaatgtgaaaaaacttgaaattgctatatataaatgataatatagcaaaggtacgtcttggacttatccaaggcaactagcatgatatttcgtcattcatataaagaatgaaaccttgagtgggagggtttaccctattaccacatcacggacttaaggaggtgtgtctcgtggctaaaaaagtagttaaagttgtaaaattgcaaattcctgctggaaaagctaacccagcaccaccagttggacctgcacttggtcaagccggtgttaacatcatgggattctgtaaggagtttaacgctcgtacagctgaccaagctggtttaatcattcctgttgaaatttcggtttacgaagaccgttcatttacatttattacaaaaactccacctgctgcagtattgcttaaaaaagcagctggaattgagtctggttctggtgaaccaaaccgtaataaagtggcaaccgttaagcgcgataaagtacgcgaaatcgctgaaacgaaaatgcctgacttaaacgcagcagacgttgaagcggcaatgcgcatggttgaaggtactgcccgcagtatgggtattgtaatcgaggattaatttgtttcttgtcgggttgcgagttttaacaagttcgcaacccttattcgtgggaggttattccgctataaccacataaggaggaaattttaaaatggctaaaaaaggtaaaaagtacgttgaagctgctaagcttgtagaccgttctaaagcttacgacgtctctgaagcagtagctctcgttaaaaaaacaaacacagctaaattcgacgctacagttgaagtggctttccgtttaggggttgaccctcgtaaaaacgaccagcaaatccgtggagcagttgtgcttccaaacggaactggtaaaactcagcgcgttctcgttttcgcaaaaggcgaaaaagcgaaagaagctgaagctgctggtgcagatttcgtaggcgatactgactacatcaacaaaattcaacaaggctggttcgatttcgatgtaatcgtagctacacctgacatgatgggtgaagttggtaaaatcggtcgtgtacttggaccaaaaggtttaatgccaaaccctaaaactggtacagttactttcgaagttgaaaaagctatcggcgaaatcaaagctggtaaagttgaataccgcgttgataaagctggaaacattcatgttcctatcggtaaagtttctttcgaggatgaaaaacttgttgagaacttcacaacaatgtacgatacaatccttaaagctaaacctgctgcagctaaaggcgtttacgtgaaaaacgttgctgtaacttctactatgggacctggtgtcaaagtagactcttcaacttttaacgtaaaataatattgacatgacatcaacattctgatattattcaaaatgttgtaaaatagaatatcatttataccgtagacagtaggggcctaaccgcttaattatcctaccgaggtgtatattatcacagctattacgttacgtatgcttgtatatacagcctccatgtctcatggaggctttttatatggaatccgtcgtctcagtcgtgatcacctaacggtataagtgttacacaagaatctacaggaggtgtaaccatgagcagcgcaattgaaacaaaaaaagttgttgttgaagaaattgcttctaaactgaaagaaagtaaatcaacgatcatcgttgactatcgcggacttaacgtttctgaagtaactgaacttcgtaaacagcttcgcgaagctaacgttgagttcaaagtttacaaaaatacgatgactcgccgtgcggttgaacaagctgagcttaatggtttgaatgatttcttaactggaccgaacgcgatcgcattcagcactgaagatgttgtcgctccggctaaagttcttaatgacttcgctaaaaatcacgaagctcttgaaatcaaagctggcgttatcgaaggtaaagtttctactgttgaagaagtgaaagctcttgctgaacttccatcacgcgaaggcttgctttctatgttgcttagcgtacttcaagctccagttcgcaaccttgctcttgctgcaaaagctgtggcagaacaaaaggaagaacaaggcgcttaatctaatcagtttttcataaattaaaacaaaatggaggaattacaaatggctttaaatatcgaagaaatcattgcttccgttaaagaagcaactgtacttgaattgaacgacctagtaaaagcaatcgaagaagaatttggcgtaactgctgctgctcctgtagctgtagctggcggagctgctgctggcggagctgctgaagagcaaagcgaattcgatcttatccttgctggtgcaggatctcaaaaaatcaaagttatcaaagttgtacgtgaaatcactggtcttggcttgaaagaagctaaagaacttgttgacaacactccaaaaccacttaaagaaggtattgctaaagaagaagctgaagagcttaaagctaaacttgaagaagttggcgcttctgtagaagttaagtaatcttcacttacctgtaggggaagctcgcttttatgaggcgagctttttctttgccattctttaagccatgaaaaaaggaggttctaataatgagtgagcactattattcagaaaaaccttcagtaaaaagcaacaagcaaacctggtcttttaggcttcggaataaagatttcacgtttaccagcgacagcggggttttttctaaaaaagaagttgatttcggctcccgcctgctgattgattcttttgaagagcctgaggttgagggcagctttttggatgtaggctgcgggtacggcccgattggtttatcgctggccagcgactttaaagaccggactatccacatgattgacgttaatgagagagccgtagaactatcaaatgaaaatgcggaacataacggaataacaaacgttaagatttatcaaagtgatttgttttcaaacgttgattctgctcaaacatttgcttctattcttacaaatcccccaatccgagccggaaaaaaagttgtccatgctatctttgagaaaagcgctgaacacttaaaagcttcaggtgaattgtggatcgtcatacagaaaaagcaaggcgcgccttctgccattgaaaagctcgaggaactgttcgatgaagtttccgtcgttcaaaaaaagaaaggctattatatcataaaagcaaaaaaagtttgactcggtattttaactatgttaatattgtaaaatgccaatgtatatattttgcttgatatgatgaattgtcaatatctatgtataaattatacaagtatggaaatgctaataaaatcggtatttgtttttggatgtggttttcttaattagaaacccttttttcttttgtcttgtaaaagtattttctttctttggaagaaatgcttattacacatataatacgcatgatttgaggggtgaatcagttgacaggtcaactagttcagtatggacgacaccgccagcgcagaagctatgctcgcattagcgaagtgttagaattaccaaatctcattgaaattcaaacctcttcttatcagtggtttcttgatgagggtcttagagagatgtttcaagacatatcaccaattgaggatttcactggtaacctctctcttgagttcattgattatagtttaggtgagcctaaatatcctgtagaggaatcaaaagaacgtgatgtgacttactcagctccgctaagagtgaaggttcgtttaattaacaaagaaactggagaggtaaaagaccaagatgtcttcatgggtgatttccctattatgacagatacaggtacttttatcattaacggtgcggaacgtgttatcgtttcccagcttgttcggtctccaagtgtatatttcagtggtaaagtagacaaaaacggtaaaaaaggttttaccgcaactgtcattccaaaccgtggcgcatggttagaatacgaaactgatgcgaaagatgttgtttatgtccgcattgatcgcacacgtaagttgccggttacggttcttttgcgtgctctcggcttcggctccgatcaagagattcttgatctcataggagaaaacgaatacctgcgaaatacgcttgataaagataacacagaaaacagcgacaaagcgttgctggaaatttacgagcgtctccgtcctggagagccgcctacagtagaaaatgcgaaaagcttgcttgattctcgtttctttgatccgaaacgatacgatcttgccaatgtaggacgctataaaattaataaaaaacttcatattaagaatcgcctcttcaatcagagacttgctgaaacgcttgttgatcctgaaacaggagaaatccttgctgaaaaaggccagattcttgatagaagaacgcttgataaagtactgccatacttagaaaacggaatcggttttagaaagctgtatccgaatggcggcgttgttgaagatgaagtgactcttcaatcaattaaaatctttgctccgactgatcaagaaggagaacaggttatcaatgtaatcggcaatgcttacatcgaagaagagattaaaaacatcacgcctgctgatattatttcttcaatcagctacttcttcaacctgctgcacggagtaggcgacacagatgatatcgatcatcttggaaaccgccgtttacgttctgtaggcgagcttctccagaaccaattccgtatcggtttaagccgtatggagcgtgtggttcgtgagagaatgtcaattcaagatacgaatacaattacgcctcagcagctgatcaatattcgtcctgttattgcgtccattaaagagttctttggaagctcacagctttctcaattcatggatcagacgaacccgcttgctgaattaacgcacaagcgtcgtctgtcagcattaggaccgggcggattgacacgtgagcgtgccggaatggaagtgcgtgacgttcactactcccactatggccgtatgtgtccgattgaaacgcctgagggcccgaacatcggtttgatcaactcactatcatcttatgcaaaagtaaaccgttttggctttattgaaacgccatatcgccgcgttgaccctgaaacagggaaggtaacgggcagaatcgattacttaactgctgatgaagaggataactatgttgtcgctcaagcgaatgctcgtcttgatgacgaaggcgcctttattgatgacagcatcgtagctcgtttccgcggggagaacaccgttgtttccagaaatcgtgtagactacatggatgtatcgcctaagcaggttgtatctgctgcgacagcatgtatcccgttcttagaaaacgatgactccaaccgtgccctcatgggagcgaacatgcagcgtcaggctgtgcctttgatgcagccggaagcgccatttgttggaactggtatggaatacgtatcaggaaaagactctggtgccgctgttatttgtaaacaccctggtatcgttgaacgcgtagaagccaaaaacgtttgggttcgccgttatgaagaagtagacggtcaaaaagtaaaaggaaacctggataaatacagcctgctgaaatttgtccgctctaaccaaggtacgtgctacaaccagcgtccgatcgtaagtgtcggcgatgaagtggtaaaaggagaaatccttgctgacggtccttctatggagcttggtgaacttgcacttggccgtaacgtaatggtcggcttcatgacgtgggatggctacaactatgaggatgccatcatcatgagtgaacgcctagtgaaggatgatgtttatacatctatccacattgaagaatacgaatcagaagcacgtgatacgaaacttggacctgaagaaatcactcgcgatattccaaacgtcggtgaagatgcgcttcgcaatcttgatgaccgcggaatcatccgtattggggcagaagtaaaagacggagatcttcttgttggtaaagtaacgcctaaaggcgtaactgaactgactgccgaagaacgccttcttcacgccatctttggcgagaaagcccgcgaggttcgtgatacttctcttcgtgtgcctcatggcggcggcggaattatccatgacgttaaagtcttcaaccgtgaagacggagacgaacttcctccaggtgttaaccagttagtacgcgtatatatcgttcagaaacgtaagatttctgaaggggataaaatggccggtcgtcacggtaacaaaggtgttatctctaagattcttcctgaagaggatatgccttaccttcctgacggcacaccaattgatatcatgcttaacccgctgggcgtaccatcacgtatgaacatcgggcaggtattggaacttcacatgggtatggccgctcgttaccttggcattcacattgcatctcctgtatttgacggagcgcgagaagaggatgtctgggaaacacttgaagaagccggcatgtctcgtgacgccaaaacagtgctttacgacggacgtactggagagccgtttgataaccgtgtatctgtcggtatcatgtacatgatcaaactggctcacatggttgacgataaacttcatgcacgctctacaggtccttactcacttgttacgcagcagcctcttggcggtaaagcgcaatttggcggacagcgttttggtgagatggaggtttgggcacttgaagcttacggtgcggcttatactcttcaagaaattctgactgttaagtctgatgacgtggttggacgtgtgaaaacatacgaagccatcgttaaaggcgacaatgttcctgaaccaggtgttccggaatcattcaaagtattaatcaaagaacttcaaagcttaggtatggatgtcaaaatcctttctggtgatgaagaagaaatagaaatgagagatttagaagacgaagaagatgcgaaacaagctgacggcctggcattatcaggtgatgaagagccggaagaaacagcatctgcagacgttgaacgcgatgtagtaacaaaagaataatctctagttataaaggcaagtgacatcggttaatccgaagataaaaagggaggtaggccccttgctagatgtgaacaattttgagtatatgaacatcggtcttgcttcaccagataaaatccgttcatggtcttttggtgaagtgaaaaagcctgaaacgataaactatcgtacgttaaaacctgaaaaggacggtctattctgcgaacgcattttcggaccgactaaggactgggaatgtcattgcgggaagtacaagcgagttcgttataaaggcgtagtttgtgaccgctgcggagtcgaagtaacacgggctaaagtccgtcgtgagagaatggggcacattgaactggctgccccagtttcccacatttggtatttcaaaggtattccaagccgtatgggtcttgtgctggatatgtcacctcgtgctttagaagaagtcatttactttgcttcttacgttgtaactgatccggcgaatacaccgcttgaaaagaaacagcttctgtctgagaaagaatatcgtgcttatcttgataaatacggtaataaattccaagcatctatgggtgctgaagcaattcataaacttcttcaagatattgatcttgtaaaagaagttgatatgttaaaagaagagctgaaaacttcacaaggacaacgccgtactcgtgcgatcaaacgtcttgaagttttagaagccttccgtaactcaggaaacaagccttcttggatgatccttgatgtgcttcctgttattcctccggagcttagaccgatggttcagctagatggcggtcgttttgcgacttctgatttgaatgacctttatcgtcgtgtcatcaaccgtaacaatcgtttgaaacgccttttggaccttggtgcgcctagcatcatcgttcaaaacgaaaagcgtatgcttcaagaggctgtcgatgccctaattgacaacggccgccgcggacgccctgtaacaggtcctggtaacagaccgttaaaatctctttctcacatgctgaaagggaagcaaggccgtttccgtcaaaaccttcttggtaaacgtgttgattactccggacgttctgtaatcgttgttggtcctcatttgaaaatgtaccaatgcggattaccgaaggaaatggcgcttgaacttttcaaacctttcgttatgaaagaacttgttgaaaaaggtcttgctcacaacattaagagtgcgaaacgcaaaattgagcgcgtacagcctgaagtttgggatgtactagaatcagttattaaggagcatccggtactgctgaaccgtgcccctacacttcacagattaggtatccaggcgtttgaaccaacgcttgttgaaggacgcgcaatccgtcttcacccgctcgtatgtacagcttacaacgctgactttgacggtgaccaaatggcggttcacgtaccattatctgctgaagcacaagctgaagcacgcatcttgatgcttgctgctcaaaacatcttgaaccctaaagatggtaaaccggttgtaacaccgtctcaggatatggtactaggtaactattacctgacacttgagcgtgccggtgctgtcggtgaaggtatggtcttcaagaatacagacgaagcgcttcttgcttatcaaaacggatatgttcaccttcatacgagagtagctgttgcagctaactcacttaagaatgtgacatttaccgaagaacagcgctcaaaattgttaattacaactgtcggtaagcttgtcttcaatgaaattcttccggaatcattcccttacatgaatgaaccaacgaagagcaacattgaagagaaaacaccagaccgtttcttcttagaaaaaggtgctgatgttaaagctgttatcgcacagcagccaatcaatgcgccgtttaaaaaaggcattctgggtaaaatcatcgcggaaatctttaaacgattccatattacggaaacgtctaaaatgcttgaccgcatgaaaaacctaggtttcaaatattcaactaaagctggtattacagttggggtttctgacatcgtcgtactcgatgataaacaagaaattcttgaggaagcgcaaagcaaagttgacaacgttatgaagcaattccgccgcggtcttatcactgaagaagaacgctatgagagagtcatctctatctggagtgctgcaaaagacgttatccaaggcaaactgatgaaatcacttgatgaactcaacccgatctacatgatgagtgactctggtgcccgtggtaacgcatctaactttacgcagcttgccggaatgcgcggcctgatggccaacccggctggacgtatcattgagttgccgatcaaatcaagtttccgtgaaggtctgacagtattggagtactttatctccacacacggtgcgcgtaaaggtcttgccgataccgctcttaaaactgctgactcaggttaccttacacgccgtctcgttgacgttgctcaggatgttatcatccgtgaaactgattgcggaactgaccgaggcattcttgctaagcctcttaaagaaggaactgaaacaattgagcgcttagaagaacgcttaatcggacgttttgcaagaaaacaagtgaagcaccctgaaacaggtgaagtgcttgtgaatgaaaacgaactgatcgatgaagataaagcactggagattgtcgaagccggcattgaagaagtgtggatccgttctgccttcacatgtaatacgcctcatggtgtatgtaaacgatgctatggccgaaatcttgcaactggctccgatgttgaagtcggtgaagctgtcggaatcattgctgcccaatcaatcggtgagcctggtacacagttaacaatgcgtacattccatacaggcggggttgccggagatgacatcacacagggtcttccgcgtatccaagagcttttcgaagcgcgtaatccgaaaggtcaggcaacaattacagaaatcgacggtacagtcgttgagatcaatgaagttcgtgataagcaacaggaaattgtggttcaaggcgcagtggaaacacgttcttatacggcaccttacaactcccgcctgaaagtagcggaaggagataaaattactcgaggccaagtactgacagaaggttcaatcgatccgaaagaacttcttaaagtgactgacctgacgactgttcaagagtatcttctccatgaggttcaaaaggtttaccgtatgcagggtgttgaaatcggtgataaacacgtagaagtaatggttcgccagatgcttcgtaaagtacgcgtgattgatgccggtgacactgatgtgcttccaggtacattgcttgatattcaccaatttactgaagcgaacaaaaaggtattgcttgaaggcaatcgacctgctacaggccgtcctgtcttactcggtattacaaaagcatctcttgaaactgattcattcttatctgctgcttccttccaggaaacaacacgtgtccttacagatgcagcgatcaaaggtaagcgtgacgagcttctcggcttgaaagagaatgttatcatcggtaagcttgttccagctggtacaggaatgatgaaataccgtaaagtaaaaccagtatcaaatgttcagccgactgacgatatggtcccggttgaataactgatttaactctgctgaaagactgcaaaaacagtctttcagcagatatatttatgaaaaagtcactctatgagaagaacgaatctaaaaaatgtcataccttgttgacattcgtctcctagaatgataatataaccaaggtgctcgaaataaacctgttactttggaggatatgtttatgtcttatgataaagtatcacaggccaaatcaattattattggtacgaagcaaacagtgaaagctctaaagcgaggttcagtaaaggaagtagtcgttgcaaaagacgcagatccgatactcacgtcaagtgttgtttcacttgctgaagatcaaggtatctctgtctcaatggttgaatccatgaaaaagctcggcaaagcctgcggaattgaggtaggagcagccgctgttgccattattttataacgtacttttgtttttgcgtaagattccatcttgtgtaaagacattgttttttgccttttgatgaaccacctgggtatgtgggttataaaacgtaatgaagggaggaaaaattcatgcctacaattaatcagctaattcgcaaaggacgcgtgagtaaagtagaaaactcaaagtctcctgcacttaacaaaggatacaacagctttaaaaaagagcacactaacgtatcttctccacaaaaacgcggggtatgtactcgtgttggtacaatgacaccgaaaaaaccgaactcagcacttcgtaaatatgctcgtgttcgtttgactaacggaatcgaggttactgcttacattcctggtatcggtcacaacctacaagagcacagtgttgtacttatccgcggcggacgtgtaaaagacttaccaggggtacgttaccacatcgttcgtggtgcgcttgatactgctggagttgaaaaccgtgcacaaggccgttctaaatacggtacgaaaaaacctaaagcaaaataatatacgaaaatacgcataattgatgaagggaggatattcagatgccacgtaaaggtcctgtagcaaaaagagatgttttacctgatccgatttacaactctaagcttgtatctcgtttaatcaacaaaatgatgatcgatggtaaaaaaggtaagtctcaaacaatcctatacaagtcattcgatatcattaaagaacgtactggcaatgatgcaatggaggttttcgaacaagcattgaaaaacatcatgcctgtacttgaagtaaaagcacgccgtgtaggtggtgcgaactaccaagttcctgtagaagttcgtcctgaacgtcgtacgactcttggacttcgctggttagttaactacgctcgtcttcgcggagaaaaaacgatggaagagcgtttagctaacgaaatccttgacgcagctaacaacactggtgctgctgttaagaaacgtgaagacactcataagatggctgaagcaaacaaagcatttgctcactatcgctggtaggatttatagattaacaaaacacaatttcctaataaggaaggagaaattacccaatggcaagagagttctccttagaaaaaactcgtaatatcggtatcatggctcacatcgatgccggtaaaacgactactacagaacgtatcttgttctatactggtcgtatccacaaaattggtgaaactcatgaaggagcttcacaaatggactggatggagcaggaacaagaacgtggtatcacaatcacttccgctgcgacaactgcacagtggaaaggataccgcgtaaacatcatcgatactccaggacacgtagacttcacagttgaagttgaacgttctcttcgtgtacttgatggtgctgttgctgtacttgacgcgcaatcaggcgttgagcctcaaacagaaactgtttggcgtcaggcaacaacttatggagtaccgcgtatcgtttttgttaacaaaatggacaaaatcggtgcagacttcctttactctgtaggaactttaagagaccgtcttcaagcaaacgctcatgcaattcaattgccgatcggtgctgaagataacttcgaaggtatcattgaccttgtagaaaacgttgcgtatttctacgaagatgacctcggaactcgttctgatgcaaaagaaatccctgaagagtacaaagagcaagccgaagagcttcgcaacagccttattgaagctgtatgtgagcttgatgaagagcttatggataagtaccttgagggtgaagaaatcacaattgacgagttaaaagcaggaattcgtaaaggtacattaaatgttgaattctaccctgttcttgttggttctgccttcaaaaacaaaggtgttcaactagtacttgatgctgttcttgactaccttcctgcaccaactgacgttgctgcaatcaaaggtacacgtcctgatacaaatgaagagattgagcgtcattcttctgacgaagagccattctctgcattagcatttaaagttatgactgacccttacgttggtaagttgacgttcttccgtgtgtactctggaacacttgattctggttcatacgtgaaaaactctactaaaggcaaacgtgagcgtgttggacgtattcttcaaatgcacgctaacagccgtgaagaaatctctactgtatacgcaggggatatcgcagctgctgtaggtctaaaagatacaactactggagatactctatgtgatgagaaggatcttgttatccttgagtcaatggaattcccagaaccagttatcgacgttgctattgagcctaaatcaaaagctgaccaagataaaatgggtatcgctttagcgaaacttgctgaagaagatcctacattccgtactcaaacaaacccagaaactggccaaacgatcatctctggtatgggtgaacttcaccttgatatcattgttgaccgtatgaaacgcgaatttaaagtagaagccaatgttggtgctcctcaagttgcgtaccgtgaaacattccgtaccggtgctaaagttgaaggtaaattcgtacgtcagtctggtggacgcggtcagttcggacacgtttggatcgaattcgaaccaaacgaagaaggcgctggctttgaatttgaaaatgcgattgtcggtggggttgttcctcgtgaatacatcccagctgttcaagcaggtctggaagatgcacttgaaaatggtgtactagcaggcttcccgcttatcgacattaaagctaaacttttcgacggttcttaccatgatgttgactcaaacgaaatggcatttaaagttgctgcttctatggcattgaaaaatgcagtcagcaaatgtaacccagttcttcttgaaccaatcatgaaagtagaagtggttattccagaagaatacatgggagatatcatgggtgatattacttcacgtcgcggacgcgtagaaggtatggaagcacgcggtaacgctcaagttgttcgcgctatggttcctcttgctgaaatgttcggttacgctactgcacttcgttctaatacgcaaggtcgcggtacgttcactatgcacatggatcactacgaagaagtgccgaagagcgtcgcagaagaaattatcaaaaaaaataaaggcgaataattgattttgccgcttaactcaagtataactactattgtaagatgaggaagtgaaagctttctttcacttcctatcactctatacattactaattaaaagctcttaaggaggattttagaatggctaaagaaaaattcgaccgttccaaatcacatgccaatattggtacaattggacacgttgaccatggtaaaacaactttaactgctgctatcacaacagtacttcataagaaatctggtaaaggtacagctatggcgtacgatcaaattgatggtgctccagaagaacgcgagcgcggtatcacaatctctactgcacacgttgagtacgaaactgaaactcgtcactatgcacacgttgactgcccaggacacgctgactatgttaaaaacatgatcactggtgctgcgcaaatggacggagctatccttgtagtatctgctgctgatggcccaatgccacaaactcgtgagcacatccttctttctaaaaacgttggtgtaccatacatcgttgtattcttaaacaaatgcgacatggtagacgacgaagagcttcttgaactagttgaaatggaagttcgcgatcttcttagcgaatacgacttccctggtgatgatgtaccagttgttaaaggttctgctcttaaagctcttgaaggagacgctgagtgggaagctaaaatcttcgaacttatggatgcggttgatgagtacatcccaactccagaacgcgacactgaaaaaccattcatgatgccagttgaggacgtattctcaatcactggtcgtggtacagttgctactggccgtgtagaacgcggacaagttaaagtcggtgacgaagttgaaatcatcggtcttcaagaagagaacaagaaaacaactgttacaggtgttgaaatgttccgtaagcttcttgattacgctgaagctggtgacaacattggtgcccttcttcgcggtgtatctcgtgaagaaatccaacgtggtcaagtacttgctaaaccaggtacaatcactccacacagcaaattcaaagctgaagtttacgttctttctaaagaagagggtggacgtcatactccattcttctctaactaccgtcctcagttctacttccgtacaactgacgtaactggtatcatccatcttccagaaggcgtagaaatggttatgcctggagataacactgaaatgaacgttgaacttatttctacaatcgctatcgaagaaggaactcgtttctctattcgtgaaggcggacgtactgttggttcaggcgttgtttctacaatcactgagtaatagtatgattttaaacgagacccctgcgggtctcgttttttgtttgcttatctttttcttgtataataggatctatcatattcgaggggttaatatttatgattcctgaaaagaaatcaatcgcaatcatgaaagaactaagcattggaaatacaaagcaaatgctgatgattaatggagttgacgtggaaaatccattgttgctttttttacatggcgggccgggaacgccgcaaatcggatatgttagacattatcaaaaagagctggaactgtattttacagtagttcattgggatcagagaggatcggggctttcttattctaagcgaatttcgcatcactctatgacaataaatcacttcattaaagatacaatccaagtcactcaatggcttttagctcatttttcaaaatcaaaactttacctagccggtcattcttgggggtcaatactggcgcttcatgttttgcagcagtgtcctgatttattttacgcgtattatggaatcagccaggttgttaaccctcatgatgaagaatcaactgcttatcaacatattcgtgaaatttctgaatcaaaaaatgccagcttattatctttcctcacacgtttcattggtgctccgccttggaagcaggatatccagcaccttatctatcggttttgtgtcgagctaagcaggggaggcttcactcgccgtcatcgtcaatctctagctgtattatttcaaatgcttactggcaatgagtatggagtgcggaacatgcacagcttcctcaatggattgcgcttcagtaaaaaacatttaactggtgagttgtaccggtttaatgcttttacatcagttccttctattaaagtaccgtgtgttttcatttcagggaaacatgacttaattgttcctgctgaaatatcgaaacagtattatcaagagcttgaggcacccgaaaagcgctggtttcaatttgagaactcagctcacaccccgcatattgaggagccggcattattcgcgaacacattaagtcgacatgcacgacaccatttatgatagatccttgataaataagaaaaacccctgtataataaaaaaagtgtgcaaaccatgcatattttaaataagtcttgcaacatgcgcctattttctgtataatggtgtatgttggtctttgactgcgatgaagtgagaggttgctgacacacccggccgctttgccatggcaaggtgttcaggtttttctcacggagaactgtctaacgtgatgtaggcgaaaaggagggaaaataatggcaaaacaaaaaattcgtattcgtttgaaagcatatgatcatagaatccttgatcaatctgcagagaagattgttgaaacggcaaaacgttctggtgccagcgtatctggtccgattccgttgccaactgaaaaatcagtttacacaatccttcgtgcggtgcacaaatacaaagattctcgtgagcaatttgaaatgcgtacacataaacgtttaatcgacattgtgaacccaacaccacaaactgttgatgctcttatgcgattagacttaccatctggtgtcgatatcgaaattaaactttaattctaaaatatagaatgatcttaataggaggtgtgacgaatgaccaaaggaatcttaggaagaaaaattggtatgacgcaagtattcgctgagaatggtgatcttattccggtaactgttatcgaggctgctccaaacgttgttcttcaaaagaaaacagctgaaaacgacggttacgaagcaatccagcttggttttgacgacaagcgtgaaaagctttctaacaaacctgaaaaagggcacgttgcaaaagcggaaactgctcctaagcgcttcgttaaagaattacgcggagtggaaatggatgcgtatgaagttggtcaggaagtcaaggttgaaattttctctgctggagaaatcgtagatgtaacaggagtatctaaaggtaaaggtttccaaggtgcgatcaagcgccacggacaatctcgcggacctatgtctcacggttcacgctaccaccgtcgtcctggttcaatgggacctgtagatcctaaccgtgtattcaaaggtaaattattacctggacgtatgggcggagagcaaatcactgttcaaaaccttgaaatcgtaaaagttgatgcagaacgcaatcttcttttgatcaaaggtaacgtacctggtgcgaagaaatctttaatcactgttaaaagtgctgttaaatctaaataattctcttaggaaaggaggaaattgattatgccaaaagtagcattatacaaccaaaacggttctactgctggtgacatcgaattaaacgcttctgtatttggtatcgaaccaaatgagagtgttgtattcgacgctattcttatgcaaagagcttccttacgtcaaggaactcacaaagtaaaaaatcgttctgaagtacgcggcggaggtcgtaaaccatggcgtcaaaaaggtactggacgtgcccgtcaaggttcaatccgttcaccgcaatggcgcggaggtggtgtcgtattcggcccaacaccacgcagctattcttataaattacctaaaaaagttcgccgcttggcaatcaaatcagtattgtcttctaaagtgatcgacaacaacatcatcgttcttgaagatcttactcttgatacggctaaaacaaaagaaatggcagctatccttaaaggattatctgttgagaaaaaagctttaatcgtaactgcggatgcaaacgaagcagtagctttatctgctcgtaacattcctggagttactgttgttgaagctaacggaatcaacgttttagacgttgtcaaccacgagaagcttctgattacaaaagcagcggttgaaaaagtagaggaggtgcttgcataatgaaagatcctcgtgatgttctaaagcgccccgtcattactgaacgttctgctgatttaatgactgaaaagaaatatacttttgaagttgatgtaagagctaacaaaacagaagtgaaagacgcggttgaaagcatctttggagtgaaagttgacaaagtcaacatcatgaactacaaaggtaaatcaaaacgtgttggacgctacactggtatgactagccgtcgcagaaaagcgatcgtaaaacttactgcagacagcaaagaaatcgaaatttttgaagcttaattatctgtaaaaagaaggagggaaattcaaaatggcgattaaaaagtataaaccgacctctaatggacgtcgtggcatgacaacttcagattttgctgaaatcacgactgacaagccggaaaaatccttgcttgctccccttcacaaaaaaggcggacgtaacaaccaaggtaaattgactgtacgtcaccaaggtggcggacataaacgccaataccgtgttatcgacttcaaacgcgataaagatggtatacctggacgcgttgctacagttgaatacgatccaaaccgttcagctaacatcgctctaatcaactatgcagacggagaaaaacgttacattcttgctcctaaaggaattcaagtaggtactgaaatcatgtcaggtcctgaagctgacattaaagtaggtaatgcacttccacttatcaacatccctgttggtacagttgtgcataacattgaattaaaacctggtaaaggcggacagcttgtacgttcagctggtacatctgctcaggttcttggtaaagaaggtaaatacgttcttgtacgtcttaactctggtgaagttcgcatgatcctttctgcttgccgtgcttctatcggtcaagtaggtaacgaacagcacgaacttatcaacattggtaaagctggacgttctcgctggaaaggcatccgtcctacagttcgtggttctgtaatgaaccctaacgatcacccacacggtggtggtgaaggacgtgcgccaatcggacgtaaatcaccaatgtctccatggggcaaacctactcttggattcaagactcgtaagaaaaagaacaaatccgataaatttatcgtacgtcgtcgtaaaaataaataacggggttgtctacggttcttttcggaccgtagtgcaatcacgaagggaggttccaaaatggctcgcagcttaaaaaaaggaccatttgtcgatggacacttgatgactaaaatcgagaaattaaatgaaacagacaagaaacaagtcgtaaaaacttggtctcgtcgttctactattttcccacagtttattggtcacacaatcgcagtctatgacggacgtaaacacgtgcctgtattcatctctgaagatatggtagggcacaagttgggtgaattcgctccaactcgtacgtacaaaggtcatgctagtgatgacaaaaaaacaagacgctaagagaggaggcttttaaatgcaagctaaagctgttgcaagaacagtccgtattgctcctcgtaaagcacgtctagtaatggacctgattcgaggcaagcaagtaggtgaggcagtatcaatcttgaaccttacaccaagagctgcttctccaattatcgagaaagtattaaaatccgctattgcaaatgctgagcataactatgaaatggacgctaacaacctggttatttctcaagcattcgttgacgaaggccctacgttaaaaagattccgcccacgtgctatgggacgtgcgagccaaatcaacaaacgtacgagccacattacaatcgttgtatcagaaaagaaggagggataagtagtgggtcaaaaggtaaatccagtcggtcttcgtatcggagtcattcgtgattgggaatctaagtggtacgctggtaaagattacgctgacttcctgcacgaagatttaaaaattcgtgaatacattagcaaacgcctttctgacgcttctgtttctaaagtagaaatcgagcgtgcagcaaaccgcgttaacattacgatccacacagctaagcctggtatggttatcggtaaaggcggttctgaagtcgaagcacttcgcaaagcccttaacagccttactggcaagcgtgtacacattaacattcttgaaatcaaaagagcagatcttgatgcacagctagttgctgacaacatcgctcgtcaattagaaaaccgtgtttctttccgccgtgcgcagaaacaacaaatccaacgtactatgcgtgctggagcacaaggtgtgaaaacaatggtttctggtcgtcttggcggtgcagatatcgctcgttctgaatactacagtgaaggaactgttccattgcacacattacgtgcggacattgactatgcaacatctgaagctgatactacttacggtaagcttggtgtaaaagtctggatctatcgtggagaggttcttcctactaagaagaaaactgaggaaggaggaaaataatatgttattaccaaaacgcgttaaatatcgcagagagcatcgcggaaaaatgcgtggccgtgcgaaaggcggtactgaagtacatttcggagaattcggtatccaagctcttgaagcttcttggattactaaccgtcaaatcgaagctgcacgtattgcgatgactcgttacatgaaacgtggcggtaaagtttggatcaaaattttcccttctaaaccttacactgctaaaccacttgaggtacgtatgggatccggtaaaggggctccagaaggttgggtagctgttgtaaaaccgggcaaagttttatttgaaatttctggtgtgtctgaagaggttgctcgtgaagcgcttcgccttgcatctcacaaattgccaattaaaacgaagttcgtaaaacgtgaagaaattggtggtgaatcaaatgaaagctaatgaaattcgtgaccttaccactgctgaaattgaacaaaaagtaaagtctcttaaagaagaacttttcaatcttcgctttcaattagcgacaggacaacttgaaaatactgctcgcattcgtgaagtgcgcaaagctatcgcgcgcatgaaaactgtgattcgtgaaagagaaattgctgctaataaataatcactgaggggaggtcgtgagcatgagcgaacgtaaccaacgcaaagtttaccaaggccgtgttgtttctgacaaaatggataaaaccattactgttgttgttgagacatacaaaaaacatacactttacggtaaacgcgtaaaatactcaaaaaaattcaaagcacatgatgaaaataatcaagctaaaatcggtgacatcgttaagatcatggaaactcgtccattgtctgcaactaagcgtttccgtctagttgaagttgtcgaagaagctgttattatctaataaagttcggaattctttttccgaagggaggtaacaaataatgattcaacaagagactcgtttaaaagtagctgacaactctggcgcacgtgaagtacttactattaaagttcttggtggttctggacgtaaaacagctaacattggtgatgtaattgtttgcacggttaaacaagcaacaccaggaggcgttgtcaaaaaaggtgaagtcgtaaaagctgttatcgttcgcactaaaagcggagcgcgcagaagtgacggttcatacatcagcttcgatgagaatgcatgtgttatcatccgtgacgacaagagcccacgcggaactcgtatcttcggaccagttgctcgtgaattgcgtgaaaacaactttatgaaaattgtttctctagctccagaagttatctaatgaaataaatgccttactcaaggaggtgcgatcaggatgcatgtaaaaaaaggcgataaagttatggttatctctggtaaagataaaggcaaacaaggaacaatccttgctgctttccctaaaaaggaccgcgttttagttgaaggtgttaacatggtaaagaaacactctaaaccaactcaagctaaccctcaaggcggtatttctaatcaagaggcgccaattcatgtatcaaacgttatgccgctcgatcctaaaacaggtgaagtgactcgcgtaggatacaaagtggaagatggcaaaaaagttcgtgtagcaaaaaaatctgggcaagttctagataaatagtattaaaaggaagggaggtctatctcatgaaccgccttaaagaaaagtacaataaagaaattgcacctgctttaatgactaagttcaattatgattcagtcatgcaagtgcctaaaatcgaaaaaatcgtaatcaacatgggtgttggtgacgctgttcaaaacgccaaagcaatcgacagtgctgttgaagaattaacgtttatcgcaggtcaaaaacctgtcgttactcgtgcgaagaaatcaattgctggattccgtcttcgtgagggaatgcctatcggtgcgaaagtaactcttcgcggagagcgcatgtatgatttccttgataaacttatttctgtatctttaccgcgtgtacgtgacttccgcggggtttctaaaaaatctttcgacggtcgcggtaactacacacttggtatcaaagaacagttaatcttccctgaaattgactacgataaagtaacaaaggttcgcggaatggacatcgttatcgtaacaactgctaatactgacgaagaagctcgtgagctattaactcaagtaggtatgccgttccagaaataatcaatgaaagggaggcgaaatcgtggctaaaaagtctatgattgcgaaacaacaacgtacaccaaagtttaaagtacaagagtacacacgctgtgaacgctgcggacgtccgcattcagtcattcgtaaatttaaactttgccgtatttgtttccgtgagcttgcatataaaggacaaattcctggcgtgaaaaaagccagctggtaatccccaagaaagggaaggaggtaattatataatggttatgacagatccaattgcagatatgctaactcgtattcgcaatgcaaacatggtacgtcatgagaagcttgaaattcctgcttctaaattgaaaagagaaattgctgaaattttaaagcgtgaaggtttcattcgtgacgttgagttcgtagaagacagcaaacaaggtatcatccgcgttttcttgaaatacggacaaaacaacgagcgcgttatcactggtcttaaaagaatcagcaagcctggtttgcgtgtttatgctaaatctaatgaagtaccccgcgtacttaacggtcttggaatcgcgattatttctacatcacaaggtgttttaacggacaaagaagcccgtgcaaaacaagctggtggagaagttctagcatacgtttggtaagaagtttaacatgaatggaggtgtttggtatgtctcgtgtaggtaagaagctacttgagattccttctgatgttacagtaacgttaaatgataacaacactgtagctgtgaaaggaccaaaaggagaattaactcgtacgtttcaccctgatatggagattaaagtagaggacaatgtgcttacagtcgctcgtccttctgatcaaaaagagcaccgtgccctgcatggtacgactcgcagtctgcttggcaacatggttgaaggtgtatctaaaggatttgaaagaggtttggaattagtcggtgtcggttaccgtgcttctaaatccggaaataaacttgttttaaacgttggatactctcatcctgttgagatcgttcctgaagaaggcatcgaaatcgaagttccttctcaaacaaaagtagttgtaaaaggtacagacaaagaacgcgtaggagctattgctgctaacatccgcgctgtacgttctccagagccttacaaaggtaaaggaatccgctacgaaggtgaagttgttcgccgtaaagaaggtaaatctgctaagtaagatcgcttaaagtgaagaaaggagtgacctagatgattacgaaaactagcaaaaatgctgctcgtcttaaaagacacgctcgtgttcgcgctaaactttccggtactgctgaaagaccgcgcctgaacgttttccgttctaacaagcacatttacgctcaaatcatcgatgatgtaaatggtgtaacacttgctagtgcatctactctcgataaagacttgaacgttgaaagcactggagatacttctgctgctactaaagttggagaattagttgcaaaacgcgctgctgaaaaaggcatttctgacgtagtatttgaccgtggcggatacttataccatggacgtgtaaaagctttggctgatgccgctcgtgaagctggacttaaattttaataaaagaaggagggacacatgattatgcgtcgtattgacccaagcaaattagagttagaagaacgcttagttacggttaaccgcgtagcgaaagttgttaaaggtggtcgtcgtttccgcttcgcagctctagtcgttgtcggtgacaaaaacggacacgtaggattcggtactggtaaagcacaagaagtaccagaagcgatccgcaaagctgttgaagatgcgaaaaagaatttgattgaagtaccaatggttggaactacaattccacacgaaatcatcggacgtttcggtgcaggtaacatcttgttaaaacctgcttctgaaggtactggagttatcgctggaggccctgtacgtgcggtacttgagctagctggtgtagctgatatcctttctaagtctttaggttctaacacaccgatcaacatgattcgtgcaacacttcaaggtttaagtgagcttaaacgtgctgaagacgttgcgaagcttcgtggaaaatctgtagaagaactgttaggataaggagggaacattaatggctaaattagaaattaccctcaaacgaagtgtaatcggtcgcccggaagaccaacgcgttactgtaagaacacttggtttaaagaaaacaaaccaaactgttgttcatgaagacaacgctgcgatccgtggtatgattaataaagtatctcatttagtttctgttaaagaacaataaaaatatttgatcggataaggaggtgtcctaatgaaacttcatgaattaaaaccttcagaaggttcacgtaaaacgcgtaatcgcgtaggtcgtggtattggttctggcaacggtaaaacagctggtaaaggtcacaaaggtcaaaacgctcgttctggcggcggtgtacgccctggattcgaggggggacaaatgcctttattccaacgtcttcctaaacgcggtttcactaacatcaaccgcaaggaatacgctgtagtcaacctagacaaattgaacggttttgcagaaggaacggaagtcactcctgaacttcttctagagactggtgttattagcaaacttaatgcaggagtaaagattcttggcaacggtaaattagagaaaaaattaactgtaaaagccaataaattctctgcttctgcgaaagaagctgttgaagctgctggcggtacagctgaggtgatctaacttgtttaaaacaatctccaactttatgcgtgtgagtgatatcaggaataaaatcatattcactttactcatgcttatcgtctttcgcataggtgcgtttattcctgtgccttacgttaacgctgaagcgttacaggcacagtctcaaatgggtgtttttgatctccttaatacatttggcggcggtgcgctttaccaattttccattttcgcaatgggaattactccttatatcacggcttcgatcatcattcagctgcttcagatggatgtggtaccgaagtttaccgagtggtctaagcaaggtgaagttggccgccgtaaattagctcagttcacaaggtactttacgattgtgcttggtttcatccaagcgttaggtatgtcatatggattcaacaatctggcaaacggtatgctgatcgaaaaatccggtgtatcgacatatcttatcattgctttagtgctcactggcggaactgcctttttaatgtggcttggggaacaaattacttctcatggagtaggcaacggaatatcgatcattatcttcgcggggattgtgtctagtattccaaaaacaattgggcaaatatatgagactcaatttgtcggcagcaacgatcagttgtttattcatattgtgaaagtcgcacttcttgtgattgcgattttagcagttattgttggagttattttcattcagcaagccgtacggaaaattgcgattcaatatgctaaaggcacaggtcgttcacctgctggcggaggtcagtctacacaccttccattgaaagtgaatcctgcaggggttattccggtaatctttgcggttgcgtttttgataacgccgcggacgatcgcgtcattctttggaacaaacgatgtgacaaagtggattcaaaacaactttgataatacgcatccggtgggtatggcgatatatgttgcgttgattattgcctttacgtacttttatgcttttgtacaggtaaaccctgaacaaatggctgataaccttaaaaaacagggtggctatatcccgggggttcgtccagggaaaatgactcaagatagaattacgagcattttgtatcgacttacgtttgtgggttctatattcttagccgtgatttccattcttcctatctttttcattcaattcgctggattgcctcaaagtgcacaaattggcggaacatctttgttaattgttgtcggggtagccttggagacaatgaaacaactagaaagccagttggtgaaacgaaactaccgtggatttatgaaaaactagaggaaatggatttatccattccctcttaataaagagaggacgggggaaatccgaatgaacttagtcttaatggggcttcctggtgccggtaaaggcacacagggcgaacgaattgttgaggattatgggattcctcatatctcaacaggagatatgttccgtgctgctatgaaagaagaaacaccactcggactcgaagcaaaatcttatattgataagggagagctcgtacctgacgaagtcacaatcggaattgtaaaagagagacttggcaaagatgattgtgaaagaggttttcttctggacggatttccgcgaacagtcgctcaagccgaagctcttgaagaaattcttgaggaatacggcaagccgattgattatgtcattaacattgaagtcgacaaagatgttctgatggaacgtctgactggacgcagaatttgcagtgtttgcggcacaacctatcatttagtctttaatccgccgaaaacgccgggtatttgtgataaagacggaggcgaactctatcaacgggcagatgataatgaggaaacagtctctaaacggcttgaggtaaacatgaagcaaactcagcctttactcgatttctattcagagaaaggttatcttgcaaacgtgaatggccagcaggacattcaagacgtttatgcagatgtgaaggatcttcttggaggattaaaaaaatgattatctgtaaaaccccacgtgaacttggtatcatgcgggaagcagggcgaatcgtggctttaactcatgaagagttaaaaaagcacattaaaccaggaatctcgacaaaagaattggatcaaattgccgaacgttttattaagaagcagggtgcaatcccatcttttaaggggtataatgggtttcgcgggagcatttgcgtatcagttaatgaagaactcgttcacggcatacctggcagcagggtgctgaaggacggtgacatcatcagtattgatatcggtgctaaattaaatggttatcatggtgactctgcatggacatatccggtaggaaacatcagcgatgatgacaaaaaacttctggaagtgacagaggagtctttatataaaggcttgcaggaagcaaaaccaggtgaacgtttgtcgaatatttcccacgcaatacaaacgtatgtcgaaaatgagcagttttcagttgttagggagtatgtcggacatggtgttggtcaagacttgcatgaggacccgcaaattcctcattacggtccgcccaacaaaggaccacggcttaaacctggcatggttctcgctattgaacctatggtgaacgctggcagccgctacgtgaaaacattggctgataactggacggttgtaacggtagatgggaaaaagtgtgctcattttgaacatacgattgcgattacggaaacgggttttgatatactgacgagagtctagatgatgaaaataattccgaagacagatgtttttcaagcttgatagggcagaaagcttgggtgaacattggcaagaccgaattcatcttgctgcttgtcgttggaattttaaccatcatcaatgtactaacagcagacggagaaaagcgtacatttcattctcctaagaaaaagaatatcaatcatttaaccctttatgattgcgtatctccggaagttcagaacagtataaacgaaacagggcgtgtgacaaacttcttttgaaatttgtcagaaagcaagttactgatttgaagaagggagaacacttgaatggcgaaagacgatgtaattgaagtggaaggtactatagtcgaaacactgccaaacgcgatgttcaaagttgaacttgaaaatggccacactgttttggctcatgtatctggtaaaatccgcatgcacttcattcgcattttacctggagacaaagttacggtagaattatctccatatgacttaactcgtggcaggattacgtaccgttacaaataaagcactccggaaactgaaggaggttggaaacacatgaaagtgagaccatcagttaaaccaatctgcgaaaaatgtaaagttattcgcagaaaaggaaaagtaatggtgatctgtgaaaatccaaagcataaacaaaaacaaggataatttataaggaggtgcccagagaatggctcgtattgctggtgtagatatcccacgtgacaaacgtgttgttatttctttaacatacatcttcggaattggccgcacaacggctcagcaagttttaaaagaagctggagtttcagaagatactcgtgtgcgcgatcttactgaagaagaacttggtaaaatccgtgatattattgacaaactgaaagtagaaggtgaccttcgccgtgaagtttctcttaatatcaaacgtctgatcgaaatcggaagctaccgcggaatccgtcatcgcagaggattacctgttcgcggacaaaactctaaaaacaacgcgcgtactcgtaaaggtccgcgtcgtactgtagctaacaagaaaaaataagtaagggaggttcttaaacaatggctgctgctcgtaaatctaacacgcgtaaacgtcgcgtgaaaaagaatattgagtctggaattgctcatattcgttcaactttcaataacacgatcgttacgatcactgacactcatggtaatgctatttcttggtctagtgccggagctttaggattcagaggttctcgtaaatctactccttttgctgcgcaaatggctgcagaaacagctgctaaaggttcaatcgaacatggtcttaaaactctagaggttactgttaaaggacctggttcaggccgtgaagctgcaatccgtgcacttcaagctgctggactagaagtcactgctatcagagacgtaactcctgttcctcataacggatgccgtccaccaaaacgtcgccgcgtgtaatttgtttgtatagattttgtgtccctgtcaataatgggttatgatacagttatttatgaaacgaatgcaccgactcgttgcctgagcacatacgggactaaacaatggggaatttcggatggaatctcatatgattctattcgaggtttcgacgttttgaaggagggttttaagtaatgatcgagattgaaaaaccaaaaatcgaaacggttgaaatcagcgacgatgccaaatttggtaagtttgtcgtagagccacttgagcgtggatatggtacaactctgggtaactccttacgtcgtatcctcttatcctcactccctggtgccgctgtaacatcaatccagatagatggtgtactgcacgaattctcgacaattgaaggcgttgtggaagatgttacaacgattatcttacacattaaaaagcttgcattgaaaatctactctgatgaagagaagacgctagaaattgatgtacagggtgaaggaactgtaacggcagctgatattacacacgatagtgatgtagagatcttaaatcctgatcttcatatcgcgactcttggtgagaatgcgagtttccgagttcgccttactgctcaaagaggacgtgggtatacgcctgctgacgcaaacaagagagacgatcagccaatcggcgtgattccgatcgattctatctatacgccagtttctcgtgtatcttatcaggtagagaacactcgtgtaggccaagttgcaaactatgataaacttacacttgatgtttggactgatggaagcactggaccgaaagaagcaattgcgcttggttcaaagattttaactgaacaccttaatatattcgttggtttaactgacgaagctcaacatgctgaaatcatggttgaaaaagaagaagatcaaaaagagaaagttcttgaaatgacaattgaagaattggatctttctgttcgttcttacaactgcttaaagcgtgcgggtattaacacggttcaagagcttgcgaacaagacggaagaagatatgatgaaagttcgaaatctaggacgcaaatcacttgaagaagtgaaagcgaaactagaagaacttggactcggacttcgcaaagacgattgactagtttcccttgtgaactaggattttcgtgtgtttattattcagaaacagcattccaataaaggaggggacatcacatgtcatacagaaaactaggacgtacgagtgcacagcgtaaagctatgcttcgtgatcttacaactgatttgatcatcaacgaaagaatcgaaacaactgaaacacgtgcgaaagaacttcgctctgtagttgaaaaaatgatcacgcttggcaaacgcggtgatcttcacgctcgccgtcaagctgctgcatacatccgcaacgaggttgcaaacgaagaaaataaccaagatgcacttcaaaaattattctctgacattgcaactcgttacgaggagcgccaaggcggatacacacgtattatgaagcttggtcctcgccgtggtgacggagcaccaatggcaattatcgaattggtttaatcacatatttttgtgtatctaaagaagggcgggacagtttctaactggatctatgccctttttttagatactgcaacttttaatagagagaaaagcagagcattagctgagaggaggccggttttccatgaatcaaaatcagttgatatcggtagaggatatcgtatttcgatatcggaaggacgcagaaagacgagcactagacggcgtctccctgcaggtgtatgagggtgaatggcttgcaatcgtaggtcataacggttcagggaaatcaacactggcccgggcattgaatggtttaattcttcctgaatcaggcgacattgaggttgccgggattcaattgacagaggaatctgtttgggaagtgcgtaagaagataggtatggtctttcaaaatccggataaccaatttgtcggaacgactgttcgcgatgatgtggcttttggtttagaaaacaatggtgtaccgcgggaagaaatgattgagagagtagactgggcagtaaaacaggtgaatatgcaagattttctcgatcaagagccgcaccatctctccggaggccaaaagcagagagttgcgattgcgggggttattgccgcacgtcctgatattattatcttagatgaagcaacatccatgcttgatccgatcgggcgagaagaagtgcttgaaacggtaagacatttaaaagagcagggcatggcgactgtcatatccattacacatgatctgaatgaggcagcaaaagcagacaggatcattgtcatgaatggcggtaaaaaatatgctgaagggccgcctgaagagatttttaaattgaataaagaacttgttcgaattgggcttgatttacccttctcattccagcttagccagcttttaagagaaaatggactggctttggaagaaaaccatttgactcaggaagggctggtgaaagagctgtggacattacaatcaaagatgtagagcatcgctatcagatgaagacgccgtttgagcgcctagcactgtatgatatcaatgcatcgattaaagaaggaagctacgtagccgttatcgggcatacaggctctggcaagtccactcttcttcagcacctaaatggtctcctgaagccgacgaagggacagatatcactaggcagcactgtcattcaggcagggaaaaagaataaagatctgaaaaaacttcgtaaaaaagtcggaatcgttttccaatttcctgagcatcaattattcgaagaaacagttcttaaagatatttcattcggaccgatgaactttggtgttaaaaaagaagatgctgaacaaaaagcgagagagatgctgcagcttgtaggtttatcagaagagcttttggacaggtcaccctttgaattaagcgggggacaaatgcgcagagttgcaattgccggcgtacttgcaatggaccctgaagtgcttgttctcgatgaaccgactgcaggattggacccaagagggcgaaaagagattatggacatgttttatgagcttcatcaacgtgggaacctgacgacgatccttgtgacacacagcatggaggatgcagctgcatacgctgatgaaatgattgttatgcataaaggaatgatacaagcatcaggcagtccgcgtgatctgtttttaaagggtgaagagatggccggctgggggctggatcttcctgaaacaataaaattccaaagacaccttgaagctgtactgggtgtgagatttaatgagcctatgctcacaatcgaagatgccgctgccaaaatccgtgctctttttcagggggagaagactttatgatggacagcatgattatcggcaagtatgtaccgggtacttcacttgtgcaccggcttgaccccagaacaaaactgatcacgatctttttatttgtctgcatcgtattcttagccaataatgttcagacatatgcgttgcttggtttatttacaattggcgtcgtttctttaacaagagttcctttctcttttttaatgaaagggctgaagccaatcatctggattgtcctttttacgttccttcttcacatccttatgacacatgaaggaccgattatctttcaaataggttttttcaaagtctatgagggcggtctggttcaggggatattcatttctcttagattcgtctatttgattttaatcacaaccttattaacgcttacgaccacaccgattgagattaccgatggaatggaacagctgctgaacccattgaaaaaattaaagcttcctgttcatgagctggctcttatgatgtcaatttctttacggtttattccgacactgatggaggagacagataagatcatgaaggctcagatggcgcgaggcgttgattttacaagcgggcctgtcaaagatagagtgaaggctattgtcccgcttcttgtcccgctcttcgtcagcgcatttaaacgcgccgaagagcttgcggtggcaatggaagcaagaggctatcaaggcggagaaggacgtacgaaatatagaaagcttgtatggacaggaaaagacacttctgtcattgtcagcttaattgtattagctgctttgttatttttcttaagggcttagaggtgctgtatgagactgaaatgcacgatttcttatgacggacatttgtttaacggttatcaggttcagccgggcaaaagaacggttcaggatgaactggagaaggctttggctgtcctgcataagtcaaaagacagaattccggttgtttcgtctggaagaacagacagcggggttcacgcagccggacaggtgattcattttgacactccgctgtctatcccggctgagagatggccatatgccttaaatgcactgcttccggacgatatcgcagtcaaacaggcagaaattgcggatgatgggttccatgcacgatttagcgcagtcaaaaaagaatatcgctactttgtatacacggagaaacacccggacgtatttaaacggcattacgcttaccatttttcatatcgccttaatgtgcaggacatgagagaagcggcaaagcatcttatagggacacatgattttacgagcttttgcgcggctaaaacagaagtgcaggacaaggtaagaacgatatacgaacttgattggactgagacggctgacggcctgcaaatgcggatcacaggcagcggtttcttatataatatggtcagaattattgcgggtactttgcttgatgcaggtattggaaaaatttctcccgatgaggtgaaatccatgctggaagcgaaggatcgcgaagcggcagggcgcacagcgccggggcacgggctatatttatggaacgtttactatgacaactaaaccaggtgtataatattttcttgacagagtctgcataaagttataagatatcatatggtatgtatttcaaccccacgataagccccggaacttattgtgttgtgaaatagaacgtaatcgaagtttattgaaaatgacagatcatttaggagggaaattcaatgcgtacaacacctatggctaacgcaagtactattgaacgcaagtggttagttgttgatgctgctggcaagactttaggtcgtctttcttcagaagttgcagctatccttcgcggaaaacacaaaccaacttacacaccacacgttgatactggagatcatgtgatcatcatcaacgctgaaaaaatcgagttaactggtaaaaagttaactgacaaaatctactaccgtcacactcaacatccaggcggattaaaatcaagaactgctcttgaaatgcgtacaaactaccctgagaaaatgcttgagcttgctatcaaaggcatgcttccaaaaggttctctaggtcgtcaaatgttcaaaaaattgaacgtataccgtggttctgagcatccacacgaagcacaaaaacctgaagtttacgaacttcgcggttaattaaaaaggaggttaccaatttggcacaggttcaatattacggtactggccgtcgtaaaagctctgtagcgcgtgtgcgtttagttccaggagaaggccgtatcgtcgttaataatcgtgaaatcagcgaacatatcccatctgcagctttaatcgaagatatcaaacaaccattaactttgactgaaacagctggcacttatgatgttttagtaaacgtacatggaggcggcctatctggtcaagctggagcaatccgtcacggtatcgctcgtgctttgcttgaagcagatccagaataccgtacaactcttaaacgtgcaggtcttctgactcgtgacgctcgtatgaaagaacgtaaaaaatacggtcttaaaggcgctcgtcgtgcacctcagttctcaaaacgttaattttacgttttcaaaaagctctcgaccttgggttgggagcttttttctttcaataaaacgtggcagcctcgcataaaaataacaactgaatggacgtttggcggggttaagcaaattgtttgtttataaacggtctctttgtaataatcatgttagctttcattcttattcaattggaacttcggtcaatgtttattatcgttatgtgctcagcccagcttcatctaaccactgtatctcatccgttaaagttcactgctgattcttaacccggagaaacaatagctctcattgctaatggctttatgtaacgaagtaaaagtaaatctgatgatataaatcacatatctcctttgtgatttttttgcgtttttatgaacttttttctaaatatgcaaagggaaagcgatatcaatctagaaatatttgttatactctatacattaaagtaaggagaagattcatgaatgcgttagtagctcataatagcaaagcctgggataaaaaagtagaaacaggcaatgaatggactgttgctgttgagcagcaggttatcgaacaagcaaaaaaaggcaattgggatataagggtaacaccaatgaaagatgtaccgaaggattggtttccgcctatcaaaggtctgaaagtactctgtttagcatcaggcggcggccagcagggtccagttttggcagccgcaggcgcggatgtcaccgtattagataactcagaaaaacaactgaatcaggataaaatgattgctgagcgagatggtctcacgatacacactgtcaaaggaagcatggacgatttaagtgtatttaatgatgaatcatttgatgtcattgtacatcctgttgccaatgtttttgttgagaatgtcctcccggtatggaaggaagcgtaccgtgtgttgaaaaggaacggcattctaatctcgggttttgtcaatcctgttgtatttctgtttgatacagaattagaacagcaaggtgttttaaaagtaaaacactccattccatacgctgacccagaagatcttccgaaacataaagtgaaaaaactgatcgaaaataatgaggctctggaattcggtcattccttagaagaccaaatcaaaggccagattgatgccggttttatcgttactggtttttatgaagataaaggcgggtttgtattagaccaatatatccatacatattctgcaacaagaagcgtgaaagtatgaaaagcagcgacctgttagaggggctgcttttttcataaccaattacagaacgtttgttccgcaccctgcggaaagctgattttttatcgattttacaccttcatttgggcgaatttccaaccgaattcgggcattgtttcatcatccaaacctcaaaataatcggtaaaaggagagtgaatttatatggcagaagtactgtcttttatggatgtgaaacgccaaaaggattttgaattagaaaagaacttgctcaaagaactctctctgagacaaattatccagtctgttaaggattgtttggaaccattatttccatttttacatgatgaacgagatattattactgaaggctgtattgattttgcgattgaagcttatttgttaggcgggcgttttgggatattcggctattacggagaatccatgcagagtatcagtgcccgctctgcaagagaagaagaagagctacgtatggagttttttgattatctctataattggatacacgagcaatacgcaacatttgataaaaacacggtttatgaagcggcacgcaagttcattaaagattggtggacagcggggtttgttcaaagagaaaaacagtgtaagcttcgcatgcgataatcatatttcccggccctgtcccatagttatgtaataacggacaagcgggaggggaagggatgaggaaaaagcttaaatggctcagttttttgctaggcttcatcgtattactatttctgttcaaatatcagttcagcaataacgactcttggaagccgtggagcttgcccttgagcggtaaaatcatttatctagatccaggtcatggcgggcctgacggcggagcagtcggcggaaagctgttagagaaggatgttaccctggaagtggcctttagagtcagggattatcttcaagaacaaggagcgcttgttatcatgaccagagaaagtgatactgatctcgctccagaaggaacaaaaggctatagtcgacgaaaagctgaggatctaagacaacgagtcaaattaataaaccattcagaggcggagctctatatcagcattcatcttaatgcgattccgtcacaaaaatggagcggagcccaaagcttttattacgggaaatatgcggaaaatgagaaagtcgcaaaatacatccaggatgagctgagaagaaatctggaaaacacaacccggaaagcaaagcggattcatggtatctacttaatgcaaaacgtcaccaaaccgggggcgcttatagaagtcggatttttatccaatccaaacgaagcaacgctactcggtaaaccgaaatatcacgacaaggtggcatcttccatatataaaggcattttgcgatatttcacagaaaaaggagaccctccggagtaatggagggttttcttgtggttctaagcataagacacccgccatttatgtatgatataataataattgtaaacgaatacacaaaagggtgaggttcgatgataagagaagatgaagtaagaaaactagtcggagaaatgcgcgaaccttttcttcaaagacctctgggagaattggatgccgttaaggaaattaaaataaagcctgaaaaacggcatatcagtgtaaaagtcgctcttgcaaaaacaggaactgcagaacaaatgcagattcagcaagagatcgtaaacgtattaaaaggggcaggagctgagacagtcggccttcgatttgaagagctgcctgaagaaacggttgctaaattccgggcgccgtcagctgagaaaaaaacattattaaatatggataacccgccagtctttcttgctgtagcaagtggaaaaggcggcgtaggcaagtcaactgtgtcagtaaacctagctatttctctggctcgtctagggaaaaaggttggtttaattgatgcggatatttatgggttcagtgtgccggacatgatgggtatcactgtgcgtccaacaattgaaggagagaaacttcttcctgttgaacgctttggagtaaaggtcatgtcaatgggctttttcgtagaagaaaatgccccggtcgtatggagagggcccatgctcggcaaaatgctgaataattttttccatgaagtagagtggggagaagtagactatatcgttcttgatcttccgcctggtacaggggacgttgctctcgatgtacatacaatgcttccgagctgcaaagaaattatcgtatctacgccacatccgacagctgcttttgtcgcggccagagcgggctctatggcgattaaaaccgatcatgaggtcgtgggtgtcatagagaacatggcttattatgaaagtgcaaagacaggggaaagagaatatgtgtttggaaaaggcggaggagataaactggctgaggaactaaacgtgcctttgctcggcagaatcccattgaaacagcccgattgggataaggaccaatttgctccgtctgtttatgacgaaaatcatccaatcggagaaatatatcaggacatcgcaaaaaaaatagatgcaaaaatgtcagtgcaggtataaaaggtgaaccgggattccagatcccggctttccctttattcactttcttttgctgtgtcttttgctgcttttttcagctcatcttcgaactgctttttgtaaagcggactagaaagtgtttcgttaataacctcttctaaataactgcggaattcttggctttttgccagctggctgtactttttatccatgccgggatcctgcataacgctcatcagcatcttctggtaatctggatccttcatcagctttttaatcactttttcatgctctgtctgaagagttttggcaaagccctcagcaaaatcagtgtcttcaaagatgtttttccaaaattcttcaccttttttagatgtgagtgttttttctattgttcctttaattgcatcttggtcaatcaccagcgcttcattcatggcatcatcatttaataattccttaatagctttctttccatcatcagtttttaatatatcaacaaccatttttttggtctgatcatagtccatatccgttgcttggtcttttggagcgcaagctgttacagataataacaaaaaacagctcatcaatagcgttttggcttttgacatgcttaagctcctttcacatacttgtcttacctttaatatgattcatctgtttggaattatacataacaaaatatcgctgttcgcgatttttgaggggatgaataaagaaatgaaaagccgtggtttagttcgttttttcttttctattttagctgtcggggcgcttatcacgagtattgtgggttttgctttaaagtggggagaatatagagggctgtttctaacatttgaagcgggacagattttctctgttttattttggtttatcggtgtaggcatgattttcagtgtgatcagccaaatgggttttttcgtgtttttaacagttcatcggtttgcgcttgagatattaaggtcctcctctttgtggaatttgctgcagttgtttttcatcctgtttgttgcttttgatttaatgtacgtgcgttttttattttttggagagagcggagaatcgctggctggctatgcgtggttaccggtgtttttattgatctttggagtgattacagcttatataaagcaaaagcagtcctctaagaaaacatttgtgtcatcgttatttttgatggttgtgattaccgcattagaatggttccctgcattaagagtaaatgatgaggactggctttatttaatgctttttccgttaatggcatgtaatgccttccaattgctgatgctgccgaagtttgcagcaaagtaattactttacctctgcggatttggcatcagaatttgcgatgagatcacccacggttacattttttaatcctttttctttcagctgatggatgatatcaggcaatgcttcttctgtttgttttgcagaatcggaggcatgtaaaagaataatgtctccaccggaaacttgcttggtcacattgtcgatgattttttcaactccgggatttgtccagtcttgagagttcacactgtaatgaacgactgtataattgtattgctttgcgacctttagaacattcttattgaattggccggtagggggtcttaatagctgtatgtctttgacccctaacttttcaaaggctgtttgcgcacggttcatgtccttttttatttcgctgctctctaaattggcatagtttttataagcgtagcccatgctcccgatttgatggccgtcctttacgatacgggccactgtgtcgggatggcgttctgcccaagaagcggacaggaaaaacgttgcgtttttaatcccgtttgctttcagagtattaagtatcggttctgctctctcatcaccccagctgatatcgaaagtaagtgaaatatctttagagtctgtttctcctttataaatggctttaggtccggtgtcagttgaaaacacgggaagcgggacagctctttggatataaaaaaagctggcagctgcaaatgcggcgataagtataataattaattgttttacccgtttaatgtgccacacatagaagtgattcactgatgatgcctccttatcttgtccatcattcttgttttacatcttatgagcatggacaattgaatataaccgataaaatgtctcttcacatacagcctaaattgggtgttgaccttttgataatatccgtgatatattattattcgtcgctgataaacagctgacatcaactaaaagcttcattaaatactttgaaaaaagttgttgacttaaaagaagctaaatgttatagtaataaagctgcttcgttaagcggcagtaatgatctttgaaaactaaacaagacaaaacgtacctgttaattcatttttataaatcgcacagcgatgtgcgtagtcagtcaaactagggcctgtacgatgcaggtcacacaggtgtcgccgcaggatgcggtgaacttaacctgtgatccatttatcggagagtttgatcctggctcaggacgaacgctggcggcgtgcctaatacatgcaagtcgagcggacagatgggagcttgctccctgatgttagcggcggacgggtgagtaacacgtgggtaacctgcctgtaagactgggataactccgggaaaccggggctaataccggatggttgtttgaaccgcatggttcaaacataaaaggtggcttcggctaccacttacagatggacccgcggcgcattagctagttggtgaggtaatggctcaccaaggcaacgatgcgtagccgacctgagagggtgatcggccacactgggactgagacacggcccagactcctacgggaggcagcagtagggaatcttccgcaatggacgaaagtctgacggagcaacgccgcgtgagtgatgaaggttttcggatcgtaaagctctgttgttagggaagaacaagtaccgttcgaatagggcggtaccttgacggtacctaaccagaaagccacggctaactacgtgccagcagccgcggtaatacgtaggtggcaagcgttgtccggaattattgggcgtaaagggctcgcaggcggtttcttaagtctgatgtgaaagcccccggctcaaccggggagggtcattggaaactggggaacttgagtgcagaagaggagagtggaattccacgtgtagcggtgaaatgcgtagagatgtggaggaacaccagtggcgaaggcgactctctggtctgtaactgacgctgaggagcgaaagcgtggggagcgaacaggattagataccctggtagtccacgccgtaaacgatgagtgctaagtgttagggggtttccgccccttagtgctgcagctaacgcattaagcactccgcctggggagtacggtcgcaagactgaaactcaaaggaattgacgggggcccgcacaagcggtggagcatgtggtttaattcgaagcaacgcgaagaaccttaccaggtcttgacatcctctgacaatcctagagataggacgtccccttcgggggcagagtgacaggtggtgcatggttgtcgtcagctcgtgtcgtgagatgttgggttaagtcccgcaacgagcgcaacccttgatcttagttgccagcattcagttgggcactctaaggtgactgccggtgacaaaccggaggaaggtggggatgacgtcaaatcatcatgccccttatgacctgggctacacacgtgctacaatggacagaacaaagggcagcgaaaccgcgaggttaagccaatcccacaaatctgttctcagttcggatcgcagtctgcaactcgactgcgtgaagctggaatcgctagtaatcgcggatcagcatgccgcggtgaatacgttcccgggccttgtacacaccgcccgtcacaccacgagagtttgtaacacccgaagtcggtgaggtaaccttttaggagccagccgccgaaggtgggacagatgattggggtgaagtcgtaacaaggtagccgtatcggaaggtgcggctggatcacctcctttctaaggatattatacggaatataagaccttgggtcttataaacagaacgttccctgtcttgtttagttttgaaggatcattccttcgaaacgtgttctttgaaaactagataacagtagacatcacattcaattagtaatacaagatatcacatagtgattctttttaacggttaagttagaaagggcgcacggtggatgccttggcactaggagccgatgaaggacgggacgaacaccgatatgcttcggggagctgtaagcaagctttgatccggagatttccgaatggggaaacccaccactcgtaatggagtggtatccatatctgaattcataggatatgagaaggcagacccggggaactgaaacatctaagtacccggaggaagagaaagcaaatgcgattccctgagtagcggcgagcgaaacgggattagcccaaaccaagaggcttgcctcttggggttgtaggacactctgtacggagttacaaaagaacgaggtagatgaagaggtctggaaaggcccgccataggaggtaacagccctgtagtcaaaacttcgttctctcctgagtggatcctgagtacggcggaacacgtgaaattccgtcggaatccgggaggaccatctcccaaggctaaatactccctagtgaccgatagtgaaccagtaccgtgagggaaaggtgaaaagcaccccggaaggggagtgaaagagatcctgaaaccgtgtgcctacaagtagtcagagcccgttaacgggtgatggcgtgccttttgtagaatgaaccggcgagttacgatcccgtgcaaggttaagcagaagatgcggagccgcagcgaaagcgagtctgaatagggcgcatgagtacgtggtcgtagacccgaaaccaggtgatctacccatgtccagggtgaagttcaggtaacactgaatggaggcccgaacccacgcacgttgaaaagtgcggggatgaggtgtgggtaggggtgaaatgccaatcgaacctggagatagctggttctctccgaaatagctttagggctagcctcaaggtaagagtcttggaggtagagcactgattggactaggggcccctaccgggttaccgaattcagtcaaactccgaatgccaatgacttatccttgggagtcagactgcgagtgataagatccgtagtcgaaagggaaacagcccagaccgccagctaaggtcccaaagtatacgttaagtggaaaaggatgtggagttgcttagacaaccaggatgttggcttagaagcagccaccatttaaagagtgcgtaatagctcactggtcgagtgactctgcgccgaaaatgtaccggggctaaacgtatcaccgaagctgcggactgttcttcgaacagtggtaggagagcgttctaagggctgtgaagccagaccggaaggactggtggagcgcttagaagtgagaatgccggtatgagtagcgaaagaggggtgagaatcccctccaccgaatgcctaaggtttcctgaggaaggctcgtccgctcagggttagtcgggacctaagccgaggccgaaaggcgtaggcgatggacaacaggttgatattcctgtaccacctcctcaccatttgagcaatggggggacgcaggaggatagggtaagcgcggtattggatatccgcgtccaagcagttaggctgggaaataggcaaatccgtttcccataaggctgagctgtgatggcgagcgaaatatagtagcgaagttcctgattccacactgccaagaaaagcctctagcgaggtgagaggtgcccgtaccgcaaaccgacacaggtaggcgaggagagaatcctaaggtgatcgagagaactctcgttaaggaactcggcaaaatgaccccgtaacttcgggagaaggggtgctctgttagggtgcaagcccgagagagccgcagtgaataggcccaggcgactgtttagcaaaaacacaggtctctgcgaagccgtaaggcgaagtataggggctgacgcctgcccggtgctggaaggttaagaggagcgcttagcgtaagcgaaggtgcgaattgaagccccagtaaacggcggccgtaactataacggtcctaaggtagcgaaattccttgtcgggtaagttccgacccgcacgaaaggcgcaacgatctgggcactgtctcaacgagagactcggtgaaattatagtacctgtgaagatgcaggttacccgcgacaggacggaaagaccccgtggagctttactgcagcctgatattgaatgttggtacagcttgtacaggataggtaggagccttggaaaccggagcgccagcttcggtggaggcatcggtgggatactaccctggctgtattgaccttctaacccgccgcccttatcgggcggggagacagtgtcaggtgggcagtttgactggggcggtcgcctcctaaaaggtaacggaggcgcccaaaggttccctcagaatggttggaaatcattcgcagagtgtaaaggcacaagggagcttgactgcgagacctacaagtcgagcagggacgaaagtcgggcttagtgatccggtggttccgcatggaagggccatcgctcaacggataaaagctaccccggggataacaggcttatctcccccaagagtccacatcgacggggaggtttggcacctcgatgtcggctcatcgcatcctggggctgtagtcggtcccaagggttgggctgttcgcccattaaagcggtacgcgagctgggttcagaacgtcgtgagacagttcggtccctatccgtcgcgggcgcaggaaatttgagaggagctgtccttagtacgagaggaccgggatggacgcaccgctggtgtaccagttgttctgccaagggcatcgctgggtagctatgtgcggacgggataagtgctgaaagcatctaagcatgaagcccccctcaagatgagatttcccattccgcaaggaagtaagatccctgaaagatgatcaggttgataggtctgaggtggaagtgtggcgacacatggagctgacagatactaatcgatcgaggacttaaccatatttttgaatgatgtcacacctgttatctagttttgagagaacactctcaatttgtttggtggcgatagcgaagaggtcacacccgttcccataccgaacacggaagttaagctcttcagcgccgatggtagtcgggggtttccccctgtgagagtaggacgccgccaagcagatttattaattctaccatgtttgtttatgaagctttatattattccgcagtagctcagtggtagagctatcggctgttaaccgatcggtcgtaggttcgaatcctacctgcggagccattgcttccatagctcagcaggtagagcacttccatggtaaggaagaggtcagcggttcgagcccgcttggaagctttatttaatgtattattaccaaggtttctcataaggagaaagctttttttattgcgatatgcggaagtagttcagtggtagaacaccaccttgccaaggtgggggtcgcgggttcgaatcccgtcttccgctccatttatcccaacgggatattgtaaattgaattgcgcccgtagctcaattggatagagcgtttgactacggatcaaaaggttaggggttcgactcctctcgggcgcgccatatcttttaatagaatagatgggaaatcgggaagtagctcagcttggtagagcacatggtttgggaccatggggtcgcaggttcgaatcctgtcttcccgaccattttttatggggccttagctcagctgggagagcgcctgctttgcacgcaggaggtcagcggttcgatcccgctaggctccaccaaaagtttttaaaaagttgttgactttgaagaagtgacgttgtatactaataaagttactttaacaaagcaaataaacaaaatgatctttgaaaactaaacaagacaaaacgtacctgttaattcagtttttaaaaaatcgcacagcgatgtgcgtagtcagtcaaactactttatcggagagtttgatcctggctcaggacgaacgctggcggcgtgcctaatacatgcaagtcgagcggacagatgggagcttgctccctgatgttagcggcggacgggtgagtaacacgtgggtaacctgcctgtaagactgggataactccgggaaaccggggctaataccggatggttgtttgaaccgcatggttcaaacataaaaggtggcttcggctaccacttacagatggacccgcggcgcattagctagttggtgaggtaacggctcaccaaggcgacgatgcgtagccgacctgagagggtgatcggccacactgggactgagacacggcccagactcctacgggaggcagcagtagggaatcttccgcaatggacgaaagtctgacggagcaacgccgcgtgagtgatgaaggttttcggatcgtaaagctctgttgttagggaagaacaagtaccgttcgaatagggcggtaccttgacggtacctaaccagaaagccacggctaactacgtgccagcagccgcggtaatacgtaggtggcaagcgttgtccggaattattgggcgtaaagggctcgcaggcggtttcttaagtctgatgtgaaagcccccggctcaaccggggagggtcattggaaactggggaacttgagtgcagaagaggagagtggaattccacgtgtagcggtgaaatgcgtagagatgtggaggaacaccagtggcgaaggcgactctctggtctgtaactgacgctgaggagcgaaagcgtggggagcgaacaggattagataccctggtagtccacgccgtaaacgatgagtgctaagtgttagggggtttccgccccttagtgctgcagctaacgcattaagcactccgcctggggagtacggtcgcaagactgaaactcaaaggaattgacgggggcccgcacaagcggtggagcatgtggtttaattcgaagcaacgcgaagaaccttaccaggtcttgacatcctctgacaatcctagagataggacgtccccttcgggggcagagtgacaggtggtgcatggttgtcgtcagctcgtgtcgtgagatgttgggttaagtcccgcaacgagcgcaacccttgatcttagttgccagcattcagttgggcactctaaggtgactgccggtgacaaaccggaggaaggtggggatgacgtcaaatcatcatgccccttatgacctgggctacacacgtgctacaatggacagaacaaagggcagcgaaaccgcgaggttaagccaatcccacaaatctgttctcagttcggatcgcagtctgcaactcgactgcgtgaagctggaatcgctagtaatcgcggatcagcatgccgcggtgaatacgttcccgggccttgtacacaccgcccgtcacaccacgagagtttgtaacacccgaagtcggtgaggtaaccttttaggagccagccgccgaaggtgggacagatgattggggtgaagtcgtaacaaggtagccgtatcggaaggtgcggctggatcacctcctttctaaggatattatacggaatataagaccttgggtcttataaacagaacgttccctgtcttgtttagttttgaaggatcattccttcgaaacgtgttctttgaaaactagataacagtagacatcacattcaattagtaatacaagatatcacatagtgattctttttaacggttaagttagaaagggcgcacggtggatgccttggcactaggagccgatgaaggacgggacgaacaccgatatgcttcggggagctgtaagcaagctttgatccggagatttccgaatggggaaacccaccactcgtaatggagtggtatccatatctgaattcataggatatgagaaggcagacccggggaactgaaacatctaagtacccggaggaagagaaagcaaatgcgattccctgagtagcggcgagcgaaacgggattagcccaaaccaagaggcttgcctcttggggttgtaggacactctgtacggagttacaaaagaacgaggtagatgaagaggtctggaaaggcccgccataggaggtaacagccctgtagtcaaaacttcgttctctcctgagtggatcctgagtacggcggaacacgtgaaattccgtcggaatccgggaggaccatctcccaaggctaaatactccctagtgaccgatagtgaaccagtaccgtgagggaaaggtgaaaagcaccccggaaggggagtgaaagagatcctgaaaccgtgtgcctacaagtagtcagagcccgttaacgggtgatggcgtgccttttgtagaatgaaccggcgagttacgatcccgtgcaaggttaagcagaagatgcggagccgcagcgaaagcgagtctgaatagggcgcatgagtacgtggtcgtagacccgaaaccaggtgatctacccatgtccagggtgaagttcaggtaacactgaatggaggcccgaacccacgcacgttgaaaagtgcggggatgaggtgtgggtaggggtgaaatgccaatcgaacctggagatagctggttctctccgaaatagctttagggctagcctcaaggtaagagtcttggaggtagagcactgattggactaggggcccctaccgggttaccgaattcagtcaaactccgaatgccaatgacttatccttgggagtcagactgcgagtgataagatccgtagtcgaaagggaaacagcccagaccgccagctaaggtcccaaagtatacgttaagtggaaaaggatgtggagttgcttagacaaccaggatgttggcttagaagcagccaccatttaaagagtgcgtaatagctcactggtcgagtgactctgcgccgaaaatgtaccggggctaaacgtatcaccgaagctgcggactgttcttcgaacagtggtaggagagcgttctaagggctgtgaagccagaccggaaggactggtggagcgcttagaagtgagaatgccggtatgagtagcgaaagaggggtgagaatcccctccaccgaatgcctaaggtttcctgaggaaggctcgtccgctcagggttagtcgggacctaagccgaggccgaaaggcgtaggcgatggacaacaggttgatattcctgtaccacctcctcaccatttgagcaatggggggacgcaggaggatagggtaagcgcggtattggatatccgcgtccaagcagttaggctgggaaataggcaaatccgtttcccataaggctgagctgtgatggcgagcgaaatatagtagcgaagttcctgattccacactgccaagaaaagcctctagcgaggtgagaggtgcccgtaccgcaaaccgacacaggtaggcgaggagagaatcctaaggtgatcgagagaactctcgttaaggaactcggcaaaatgaccccgtaacttcgggagaaggggtgctctgttagggtgcaagcccgagagagccgcagtgaataggcccaggcgactgtttagcaaaaacacaggtctctgcgaagccgtaaggcgaagtataggggctgacgcctgcccggtgctggaaggttaagaggagcgcttagcgtaagcgaaggtgcgaattgaagccccagtaaacggcggccgtaactataacggtcctaaggtagcgaaattccttgtcgggtaagttccgacccgcacgaaaggcgcaacgatctgggcactgtctcaacgagagactcggtgaaattatagtacctgtgaagatgcaggttacccgcgacaggacggaaagaccccgtggagctttactgcagcctgatattgaatgttggtacagcttgtacaggataggtaggagccttggaaaccggagcgccagcttcggtggaggcatcggtgggatactaccctggctgtattgaccttctaacccgccgcccttatcgggcggggagacagtgtcaggtgggcagtttgactggggcggtcgcctcctaaaaggtaacggaggcgcccaaaggttccctcagaatggttggaaatcattcgcagagtgtaaaggcacaagggagcttgactgcgagacctacaagtcgagcagggacgaaagtcgggcttagtgatccggtggttccgcatggaagggccatcgctcaacggataaaagctaccccggggataacaggcttatctcccccaagagtccacatcgacggggaggtttggcacctcgatgtcggctcatcgcatcctggggctgtagtcggtcccaagggttgggctgttcgcccattaaagcggtacgcgagctgggttcagaacgtcgtgagacagttcggtccctatccgtcgcgggcgcaggaaatttgagaggagctgtccttagtacgagaggaccgggatggacgcaccgctggtgtaccagttgttctgccaagggcatcgctgggtagctatgtgcggacgggataagtgctgaaagcatctaagcatgaagcccccctcaagatgagatttcccattccgcaaggaagtaagatccctgaaagatgatcaggttgataggtctgaggtggaagtgtggcgacacatggagctgacagatactaatcgatcgaggacttaaccatatttttgaatgatgtcacacctgttatctagttttgagagaacactctcaatttgtttggtggcgatagcgaagaggtcacacccgttcccataccgaacacggaagttaagctcttcagcgccgatggtagtcgggggtttccccctgtgagagtaggacgccgccaagcaattgcacgttagtgtaattttttaaaaaaagttgttgactttgaagaagtgacgttgtatactaataaagttgctttaacaaagcggacaaacaaaatgatctttgaaaactaaacaagacaaaacgtacctgttaattcagtttttaaaaatcgcacagcgatgtgcgtagtcagtcaaactactttatcggagagtttgatcctggctcaggacgaacgctggcggcgtgcctaatacatgcaagtcgagcggacagatgggagcttgctccctgatgttagcggcggacgggtgagtaacacgtgggtaacctgcctgtaagactgggataactccgggaaaccggggctaataccggatggttgtttgaaccgcatggttcaaacataaaaggtggcttcggctaccacttacagatggacccgcggcgcattagctagttggtgaggtaacggctcaccaaggcgacgatgcgtagccgacctgagagggtgatcggccacactgggactgagacacggcccagactcctacgggaggcagcagtagggaatcttccgcaatggacgaaagtctgacggagcaacgccgcgtgagtgatgaaggttttcggatcgtaaagctctgttgttagggaagaacaagtaccgttcgaatagggcggtaccttgacggtacctaaccagaaagccacggctaactacgtgccagcagccgcggtaatacgtaggtggcaagcgttgtccggaattattgggcgtaaagggctcgcaggcggtttcttaagtctgatgtgaaagcccccggctcaaccggggagggtcattggaaactggggaacttgagtgcagaagaggagagtggaattccacgtgtagcggtgaaatgcgtagagatgtggaggaacaccagtggcgaaggcgactctctggtctgtaactgacgctgaggagcgaaagcgtggggagcgaacaggattagataccctggtagtccacgccgtaaacgatgagtgctaagtgttagggggtttccgccccttagtgctgcagctaacgcattaagcactccgcctggggagtacggtcgcaagactgaaactcaaaggaattgacgggggcccgcacaagcggtggagcatgtggtttaattcgaagcaacgcgaagaaccttaccaggtcttgacatcctctgacaatcctagagataggacgtccccttcgggggcagagtgacaggtggtgcatggttgtcgtcagctcgtgtcgtgagatgttgggttaagtcccgcaacgagcgcaacccttgatcttagttgccagcattcagttgggcactctaaggtgactgccggtgacaaaccggaggaaggtggggatgacgtcaaatcatcatgccccttatgacctgggctacacacgtgctacaatggacagaacaaagggcagcgaaaccgcgaggttaagccaatcccacaaatctgttctcagttcggatcgcagtctgcaactcgactgcgtgaagctggaatcgctagtaatcgcggatcagcatgccgcggtgaatacgttcccgggccttgtacacaccgcccgtcacaccacgagagtttgtaacacccgaagtcggtgaggtaaccttttaggagccagccgccgaaggtgggacagatgattggggtgaagtcgtaacaaggtagccgtatcggaaggtgcggctggatcacctcctttctaaggatattatacggaatataagaccttgggtcttataaacagaacgttccctgtcttgtttagttttgaaggatcattccttcgaaacgtgttctttgaaaactagataacagtagacatcacattcaattagtaacacaagatatcacatagtgattctttttaacggttaagttagaaagggcgcacggtggatgccttggcactaggagccgatgaaggacgggacgaacaccgatatgcttcggggagctgtaagcaagctttgatccggagatttccgaatggggaaacccaccactcgtaatggagtggtatccatatctgaattcataggatatgagaaggcagacccggggaactgaaacatctaagtacccggaggaagagaaagcaaatgcgattccctgagtagcggcgagcgaaacgggattagcccaaaccaagaggcttgcctcttggggttgtaggacactctgtacggagttacaaaagaacgaggtagatgaagaggtctggaaaggcccgccataggaggtaacagccctgtagtcaaaacttcgttctctcctgagtggatcctgagtacggcggaacacgtgaaattccgtcggaatccgggaggaccatctcccaaggctaaatactccctagtgaccgatagtgaaccagtaccgtgagggaaaggtgaaaagcaccccggaaggggagtgaaagagatcctgaaaccgtgtgcctacaagtagtcagagcccgttaacgggtgatggcgtgccttttgtagaatgaaccggcgagttacgatcccgtgcaaggttaagcagaagatgcggagccgcagcgaaagcgagtctgaatagggcgcatgagtacgtggtcgtagacccgaaaccaggtgatctacccatgtccagggtgaagttcaggtaacactgaatggaggcccgaacccacgcacgttgaaaagtgcggggatgaggtgtgggtaggggtgaaatgccaatcgaacctggagatagctggttctctccgaaatagctttagggctagcctcaaggtaagagtcttggaggtagagcactgattggactaggggcccctaccgggttaccgaattcagtcaaactccgaatgccaatgacttatccttgggagtcagactgcgagtgataagatccgtagtcgaaagggaaacagcccagaccgccagctaaggtcccaaagtatacgttaagtggaaaaggatgtggagttgcttagacaaccaggatgttggcttagaagcagccaccatttaaagagtgcgtaatagctcactggtcgagtgactctgcgccgaaaatgtaccggggctaaacgtatcaccgaagctgcggactgttcttcgaacagtggtaggagagcgttctaagggctgtgaagccagaccggaaggactggtggagcgcttagaagtgagaatgccggtatgagtagcgaaagaggggtgagaatcccctccaccgaatgcctaaggtttcctgaggaaggctcgtccgctcagggttagtcgggacctaagccgaggccgaaaggcgtaggcgatggacaacaggttgatattcctgtaccacctcctcaccatttgagcaatggggggacgcaggaggatagggtaagcgcggtattggatatccgcgtccaagcagttaggctgggaaataggcaaatccgtttcccataaggctgagctgtgatggcgagcgaaatatagtagcgaagttcctgattccacactgccaagaaaagcctctagcgaggtgagaggtgcccgtaccgcaaaccgacacaggtaggcgaggagagaatcctaaggtgatcgagagaactctcgttaaggaactcggcaaaatgaccccgtaacttcgggagaaggggtgctctgttagggtgcaagcccgagagagccgcagtgaataggcccaggcgactgtttagcaaaaacacaggtctctgcgaagccgtaaggcgaagtataggggctgacgcctgcccggtgctggaaggttaagaggagcgcttagcgtaagcgaaggtgcgaattgaagccccagtaaacggcggccgtaactataacggtcctaaggtagcgaaattccttgtcgggtaagttccgacccgcacgaaaggcgcaacgatctgggcactgtctcaacgagagactcggtgaaattatagtacctgtgaagatgcaggttacccgcgacaggacggaaagaccccgtggagctttactgcagcctgatattgaatgttggtacagcttgtacaggataggtaggagccttggaaaccggagcgccagcttcggtggaggcatcggtgggatactaccctggctgtattgaccttctaacccgccgcccttatcgggcggggagacagtgtcaggtgggcagtttgactggggcggtcgcctcctaaaaggtaacggaggcgcccaaaggttccctcagaatggttggaaatcattcgcagagtgtaaaggcacaagggagcttgactgcgagacctacaagtcgagcagggacgaaagtcgggcttagtgatccggtggttccgcatggaagggccatcgctcaacggataaaagctaccccggggataacaggcttatctcccccaagagtccacatcgacggggaggtttggcacctcgatgtcggctcatcgcatcctggggctgtagtcggtcccaagggttgggctgttcgcccattaaagcggtacgcgagctgggttcagaacgtcgtgagacagttcggtccctatccgtcgcgggcgcaggaaatttgagaggagctgtccttagtacgagaggaccgggatggacgcaccgctggtgtaccagttgttctgccaagggcatcgctgggtagctatgtgcggacgggataagtgctgaaagcatctaagcatgaagcccccctcaagatgagatttcccattccgcaaggaagtaagatccctgaaagatgatcaggttgataggtctgaggtggaagtgtggcgacacatggagctgacagatactaatcgatcgaggacttaaccatatttttgaatgatgtcacacctgttatctagttttgagagaacactctcaatttgtttggtggcgatagcgaagaggtcacacccgttcccataccgaacacggaagttaagctcttcagcgccgatggtagtcgggggtttccccctgtgagagtaggacgccgccaagcaagcttaaacccagctcattgagctgggttttttattttatatctgtgccgatttgcttttatcagtatccattttatcaagcttctgctttttaagttttctaatacttttgaatccaatacaatcaccagcatgatcaacatgagagtcataaataatcaaaatgcagtttgtacgggagactcatccagactccatccgtctgcaattggcagaatagagccgccaatccattggcagcgagcagcatgcctgtcgtttgttctgtttttccatgatgaaattgattggtgacaattaagataatggcgaacatgctggccataaataagtcctaagaaaaaactaagaataatccctgcaaaagctgttttattgattgccaaaatacagagttaaatgaggccgctcatatttatcagcctgagataatgatgataggttattttttcggaaaccggctcgggttgccaaatgagagaaaagatattactgtcattaaaacgattcttggtttcatccggatatgataaaatgtctcagactatatttgagccatttttttcttcagcaatcatcttgcgtaattgataaaaatttattatgatactctttgtatgacaactccttgcctcaatacaatatactcaacgtttccccgttttctccggtcgtttttcttttcattttctcccgtaaaataaaaaaagctcccaatacaatagatatggtgcggatttattttttactaaaaaggagtcgttatatttgaataatagttttacattaaaacagcaatggttcgggaatatccgaaaagacattcttgctggcattttagttgcgttagcgttaatacctgaagcgattggcttttctattatagccggtgtggatccgatggtcggtctttatgcgtcattttgcatagccattattatttctatttttggcggcagacctggcatgatttcagctgcgacaggctcaatggcagttgttatggtgtcgctggttgctgatcatgggcttcagtatttatttgcagctacgattttgactggcattattcaagtgattttaggtatcagtaaaattgcaagattaatgaaattcatcccgcgttctgtgatgatcgggtttgtgaatgcgctggcaatccttatcttctctgcgcagcttccccagtttgaaggtgcttcttggagcatgtatgcgatgcttgccgggtcgttggttattatttatgtgctgccaaggtttacgactgctgttccgtctccgcttgtggcgattattgtgatgacaattattgcggtcactttccatgtggatgtgcggacggttggtgatatgggcaatatttctagttcattgcctcatttcttaatccctgatgttccgtttacctttgaaacactgcaaattatttttccttattcaattgctttagcgtttgtcgggttgcttgaatctttgctgacagcacagattattgatgaaatgacggatacggatagtgataaaaataaagagagccgcggacagggaattgcgaatatcgtgactggattctttggcggaatggcaggctgcgctatgatcggacaatctgtcattaatacaaaagcgggcggtcgcggacgtttgtcagcatttgttgccggtgcttttctgatgtttttaattgcggtgttaagtcatgtcgtggtgaaaatcccaatggcggcgttagtggctgtaatggttatggtgtctgtcggcacttttgattggtcttctttaaaaggtctcaaaaaagcgccgctcacggactcgattgtcacggttgtgactgtggttacggttgttgtgacagatgacttatctaagggtgtatttgtcggtgttcttttaagtgccgtgttctttgtagcaaaaatctcgaagctgaaaatcgtttctcatgcagaggatcaaaagcttagaacgtatcaagtgaaggggcaaatcttttttgcgtcagtgactgatcttacgaatgcgtttatatatcaagaggatattgagcgggttgtgattgacttaactgaagctcacgtatgggacgattctggtgcggccgcacttgataagattgttgcgaagtttaaggaacaaggcattgaagctgagttaaaaggtttgaataaagcgagtaaatctctaatgaaacagatggcataaaatagagaagcccagatgaatgagatctgggcttttttatataacatacacttaagcagcattgatataatagagagaagagaaattttaaataggggacttgcatatgatgcttcagaagctgaaccgtgtattggggagagtgatgccgctgttaacgccgactagtgtggtgttgggcgtgctgctgtctcagtttttaaatgggtatgaatgggctgtaccttggatctttgcttttattacgtttgcaggcagtttgagcgcgaactttcaatctttgagacatgcattgtctcatcctctccctatgattcttgcactattcgttcttcatattttcatgccgctttttgcttggggcagcggccatcttatatttaaaggtgatcctttgacgattaccggtttaacattggctgttgtgattcctacggggattacaagcttgatttgggcagcgatgtacaaagggaatgtcggtttgacactttcgattattttaattgatactgtgctgtcaccgctaatcgtaccgctgagtctttcattgctggccggcgctcaggttcatatggatgtgtggggaatgatgaaaggtctgattgtaatggtcgtgattccttcttttctgggcatgctgtttaatcagatgtcatctccagaaagaactgcgtctgtgagcagtgcgctgtcgcctttttcaaagctttgcttgatggcagtgattgcgattaacagttcagcgattgctccttatttcaaatccattgatttgagatttgcaggaatagctgtaacggtattctttatcgcgttaacaggctatgccgctgcttggctgatcggaaaaatgatgaaaaggcggcaagaggaaatagtctctcttatatttacgggaggcatgaggaatattagtgccggcgcagttcttgccgttacgttcttcccgtctcaggttgccgttcctgttgtgatcggcatgctgtttcagcagatattggctgctttgtttggctatatgctgaatcgttttgaattaaaaccaatgttgcagaaagcataaaaaaaccgctcatagggttgagcggttttttccgtatagccattcgagcgcgttgatgaactgtttgcagaaatacttgcggtggtgcaccgctcctttttcaattgaaagatacaaccggtcttcagtgaagcctttttcttttagactttgatgaacttgctttgtttttttcagcatatgtcgctgaatggattgtttttcacggccttcttcactcccgacagacatgaaaacacgtgtagtgccgggctttaaagaagatatatgaatggtttccgctgcgttctcgtaccagtatgaacctgatatagagcctattttcccgaacattgacggatattttaataaggcgaacattgagatgaggccgcctaatgaggcaccgatcattcctcttgactgcggttccctgatgacgttccagttttcttcgattagcggaatgaactggttcgttatatcagacagatagtgatatcccattccgccgaagtccgtgaaccgatcactgagtgatgcagccggccaaggtgtgtattcatttagccggttttcgggttcgataccgatcagcacgagttcagggagcctttgctgttgatatgcgctttctaataattcgatttggttttggaacaaagaactgccatcctgcacgtaaacagcaggaaatcccccgctgtctgtgctgtaggaaggagggaggtacagcgtgaacctcctgttgccggctttgtgttctgaaagagatcctttcaagcattctccccctttttttgcttgaaaagcagatataagaaataaggaactccgaggatcgccaaaatgatgcctgcgggcacttctgcgggctgaaaaaacagttttccggcaaagtctgcgcttatcacaagaagcatcccgattaaaccgctcagtggcaggatatagcgatgttcgacgccagccagtctccgtgagatatggggagcaattaagccgacaaacgccatacttcccgctacggagacacaggcgctgatgattgctacacaggctacgagcaggatggttttttctttatttgatgaaatgccgaggcttctgactgtgtcttcatcaaaacgaatggtgtcgagcaggcgggatttgccgataagaatcggtataaacagcagcatccatgggagaacggctgtgatatacgtccagttggcagaccagatgcttccgtttttccacaccatggccatttgatagtcttgcgggtccatttttaaagataaaaacaaagacagggcgctgaatcctgaattgatcgcaatccctaccagaataattcttcctgaatctaaattgcctctgtgccatgcaaatatgtaaatcaggatcgccgcgatgagcccgcctatcaatccaaagagcggcattcccatcgctgcagctatggatgtcacttccttctggccttggaataagagcataaacgctacaatgccggctcctgcccctgcgttgattccgagaattccaggatcagcaagcccgtttctcgtgatggcctggataacagcgcctgcaatgccaagaccgagtccaataatagcagccatgacaacccgcggcagccttaaatcgaacagcaaaatttcatactgcggattcgggtagatttgaaaaagagtggagagcagctcagcaggacgaacagaaaatgatccgctcgttaagctgaaataactgacaacaagaatcaaagcgatgaacaatgcatattttttagccattttgctcccctccttttcgtttaattaaataaaggaagaaaggtacgccgataatggatgttacgacctcaatcggtgtttcaaacggatagttgataaatctgcttgcgagatcacacagggttaaaaagattccgcccaaaatacaggagcacggaatcagcctgctgtaatcagagccgacgagaaatctcgtgatatgcggaacaaccaatccgacaaacgcaatttttccggccagcgctacggcactgccggttaaaatgatgacggaaagcatcgccatgattttaatggtttttttcttttgccccaggcttttagaaatgtcgtcccctaatgatacagcggttacctttttgctgagagaaatggccattataatgccaatcaggaaaaacggagcggcgagcttcaggaaatccggactcatttgatgaagtctggcactgtaccagaaactgagatcctgagaaatttgaaaataaatcgacatggccgctgataagctgctgagcagcatgcttgtgactgtgccgatgatggcgagctgcacgggggtaaatccgtttggcatcatggcggcaaggccgaatactaacacagctcctaacgctgagccgataaaagagtatatcatcatttcaatcgaagatgattgcgggagcagaaccatgcaaagcgtaatgataaacgctgaaccatctgaaacacccataatggatggcgaagctaaataattgcgcgtaatgccctgcataagcgctccagaaacagcaagggctgcccctatgagcagagcgccggcagcccttggaatccgggaatgccatataatttgatggtctgtgtttcccggatcgaaatgaataagagatgtaaaaacaatatctgtgctaagatgctttgccccataaaggattgaaagtaaaagtgacagcgctatagcaaatggagaagtaatcaatatgatacgtgtccactgttttgaatacatacaaaaacctactctgaattagttttgtgtcaatttttcagcagccgctttcaggaaacggactttgctccaagctgtgccgccttgtgcgagagggtccactgagttgacatacacatggtcttctttgactgctttaaggcttttccagattggatttttctctaaatcttttaaggcatcaggtttatctgcattttcatcatcagaaaattggacgaaaatatggtccgggttcatttcacttaatttttctaatgaaatcagctcttgcgcttttgcagcttttacttcgttaggcgccttaaggcctaaatcaccgtatagtgtggagttgaaatacacctgttcagggtaaatgtaaatgttgccttgtctaattctaatgacaagcgcttttgaatctttcgctttatcgttgatttttgtttttgtttcttttagatcttgttcatagtctgcaataattttctttgcttttttctcttttccggtcagctgggcaagcagcatcatgttttccttccagtttgaagagatatgagaaactgggatcgtcgtgcctgctgtgctgattttttgcagcgttttttccggaaactttgttgaagcaaggataacatctggcttcatttcaagaatcttttcaatatttggctccattttttctccggttggttcggctttatcagtgatgtctttgaacatatcagggaatttgccggagaatgaaattgcgccttgcggatgaacgtcaagcaatttcgcgtcttccattgattcaacgcttcccgtaatggcgattttgtctgtcggtacagttacttcatatgttttatcaagatattcaattttcttcttctcagatgctgtgccgcttgccttgctggcagttgattcatttttgctgccgcaagctgccgccgtcagcgcgagaagcaagattaataaggtaagagatatctttttcatctatagagcctcctgttcaattgataactattatcaattggaattatagagaatgaacagatataacaccatggacaaattcctgatttatcatggacaatctccggatagtaaagaaacagtttgctgaacgatgcgttcgtgcccgcaagctgagtattcattccacgggtcaagggatagaagataaacacggttatctcgtaccgcgcttaggttttgccatgcttctgtctgctgtaattgctggtagtaagctatggtctccggctctttaaaaagaaaaagcatcatacagtcagcttggtaatttgcgatattttctaacgaaatcgcttgttctgaaggtgtgtcagccgttgttgccgagctgaatcctaaatccccaaagaaaacttcgcggacacttcggttatgtgccagatagaagttttgcttatgcagcctcaaaaagagaaaacgcagcccttgaacgtgctgaagtgtttttttggcggctgttgtctgctggtcataatccgctagccacttttctgcttcggactcctcctttaaaaatgaggcagtttgcagaaagtgggttctccagctttcttctgaaggaaggtacatgacttctgcgatgcgattcaggcgatcttgttcttctggagaaatagaatccatgctgacaatcacatctggttctgcctgcgataacgtgtacaggttttcttcccacttttcattaaaccggtatgcactgagctggacgggtatatctgtcgaataatgctgatagtagtaagacgtccatttcggatgcagagcggccgcaaaaggtatgtggtgaagagggatgagatggcccattgtgccccttccgtatgcggcgattttctttcggcgttttttcatatagcttgtaggtgaacagcctgtatattttttaaagattctgctgaaataaaattcatcttgataaccggtttggtgtgcgatttctttcaatttgcagtttgattttgccatgagccgttttgcctttgtgattcgtgttttcgtaataaattctgttacgctctgtcctgtccattttttaaagctttcactgtagtgtttggcactgattcctgccatttgcgacagctgggcaagcgtgatttttgtatcggcatgtgtttcgatatagtgttttgttttttcgattgctgaatgtgtatccgtttgatcagataaactggcagtaaaaagatcataaatcaggctttgtacttcaatcacacattttagctgagaaagctgagacgattcattccatagtgcggcaagctcttgaagccggactgcaagattttcgatatgtgaaacattcataagcttcagtttggctaattccgattctgtgcacggtgtgtaaatatcttggccggcttccttgatatagctttgaagcctgatcagacaggcatctatatgtccatcggctgctggcataaagccaaaggtctcgttaggcggacaaacataaagtgtctttttttgcagaggattggtgtttgttccgatcgaaatatagccgtttccttttaaatgaaaaatcagcacgaatgaatcggctaattgctgttctgagaagagatcacttgtcttttttagatattcaatttgtatcggttgataaatcactgcattttgcacgagtagaccaccttttcagaagctttcaattgataatcattttcaataaaaattgtaccaaataaatgaaagttttcctatataaagcgggtgggtttttagcatgaaaaaaacccttacttatgtgtaaaagtaagggtctttcgttcagtaagaatatgttacacgtgtaacatacgatgcttacgttctaataaatgagatatttttttcttgttttgctgaattgttggagtgttttttcatagctgtttatgatgccctcaaccgaagttccattttcaatttttgtcctgatccagccgttgcctgccagtttatcgaatgaacctgttgacaggaactcaaaatcctcaggatagagatcgtgtatggttttaatgactgaaagacccgttttaacggcttcaaacttatctctgtctgtcacatagagctgcacaccgtggcaaagcgttccttgatgtttagaaaacgtcggtgtgaaggatgctgccctaaatgttacgcccggcaaatggaggctgtttaatgtttcttcaagttctgtgcttttgataaagggagctccgatcaattcgaatggctttgttgtccctcgcccttcggatatatttgttccttcaatcagcccggttgcaggataaacaaatgtgctttccaccgtcggcatgttaggcgaagggaggacgaaaggcaatcgggtatcgtcaaaatccatttttcgtttccagtgtttcatttttaccactgtaagatcggcatcaatatcaaattctttgttgaacagtaaagccaattcgcctatcgtcatcccatgcttcaatggaatgggatacaatccgacaaatgaggcgtattcaggttctaagattggcccttcaatatgattcccgccttggggattcggacggtctagcaccataaatggaatgccgttttctttagcggcttccattgcgtatgccattgtataaatgtacgtgtagaaacgggtcccgacatcctgaatgtcaaacattagaatatcgacatttttcagcatttctggagtcggttttttcgtttttccgtagaggctgtatacgggaaccccggttttttcgtcaatgtaagagcctacttcgtctccagcctgggcgtcaccgcggacgccgtgttcagggccgaataaagctgtcagtttgatatctgggttctcgtaaagaatatcgacactgcttttcagagatgcgtttactccggttggattggtgatcagtccgatgcgttttcccttgagctgttttttatagtctggcaagagcgtgtctatcccagtctggactttaggttttttagccgtttgattctttgaatcgggtgaagcagaggcagcggttatcgttccgaacatcatgagccctgtcagaaaagcgaatattgtttttctcatgtgtccctccttattaaagcggtcttcccgttttgatatttaatccgtagccatatggataaagggtgtcccccgggttcgtgactgatgggatgttaactggaagtgtgcctttaggttttgcctggccgaaaatcgccatcactccggccggaatattaggttgaagataacggccatttgcgtatcctttaaagccatagactgcaatcagtgcctttgcttcttcgaaattggcggcatcatatgggttgcgcaggctcattaagacaaatggtttgttgtgctgcagtgcggctttcatgacagctctcggaaacacggtggcccatttgcttgaatctgatattgtgtcgtcgatgacaccgtcgttgacgacagggtcatttttgacgacataggagccggttatgatataatcagccttttttacttgttttgcatgctcggcattaaatacttggttggcaaaattcattttgtcgacagatacgggtttgattttctttcgcttgatgagatcgtgaatggtttgttcgattgaagcagtttgttcttcgtaaggtgccacaattaagattcggctgccttttttaggcttgaacggcaaagtgtgctgttcattttttaatacagttactgctttttcagctatttttttctctgttttcaggtgctgctggcttcctacgatttttttggctttggctattttttcttttgtactgtcgctgtttcgtgctggatacatgccgcgttttattttcagggaaatgattctttcaactgatttgttgatttgttgttcaggaatatccccgtttttcacggcttctttcaaagcttgaatgacacgtgcgaatttctgttcttctttcattgaagtgactgaggctggcattaatgcaatatcgacaccagcttttacggccatgaccacagcctcctcctgtccgaaatgatctgcaattgccttcatattgagcgcatcggtaacgatgaccccattaaagcccatttcctgacgaagaagacctgtcatcactttttgcgaaagtgtagctggaaccagaatgtccgatccatcgagtttgcttttgtatgtggtgtcgtcgaaggcagggaattgaacatgggctgtcatcaccatatcagcaccagcatcaattgctttttgaaaaggataaagctcgacctcacgaagccgttcttggccatgggaaacgagcggcagtccataatggctgtcaacgtccgtgtctccatgtcccgggaaatgtttgagggcagacgcgatatcctgccgctgcaaccctttcatcgtatatagaccgaggcgtgatgtcagttctcgattggagctgaatgaccgtacgccgattacaggattatcaggattattgttaatgtccacgacagggctgaaatctgtattgatgcctaaggcagagagctctttcccgatgatgctgccggtctgatacgcattgattctgcttctggctgcgcccagcgccatattccctgggaaattagtgccctcccctaacctcgttacaatgccgccttcctgatcaatactcagcatgagcgggatttttggacttgccttttggtaatcgtctgtcagttggacagtttgttttgttgtttttacattttctgcaaaaaggatgatgcctccgaattgatatttcttgacgaggctggcgacttcatcattcatttctgtaagggcttgcggagaggactcgccttccttttgccaatttctaaaatcaggcatcagcatctggccgagtttttcatctaacgacatacgattgacaatctgattggcatcgattgaacgtttggatgcagaggcttctgtctgtctggccccgaaaaagcatgaaagaaagagaacggctgaaaggataagcggaaagacaggtctcatagaaacttcctcctatcgtctaatcattcactccatcgcttcataaatcgcggttatgacacttccataactgcctgttgcaaattgatcaccctcaaagacgtttggattttcttccggatcaataactggtgtatgctttttatttgttaacaatgcgatgcctaaattgtatgctggatcaataattgtaactgtccctgtccagccggtatgcccgtaagcattttcactggcatgagggccaaacatccattccacgcttttacttccgttccgcctccagccaagagcgaatgtcgggtctgttgctgaaggtgctgtaaacaggtcggctgttttctgatcaaataaagaaatgtttcggtatgaacctttgtttaacatgacttgcagcagtatggccatatcatctgcatttgagaacaatccggcatgcccagacacgccatccattgagtaaaacgctttttcgtcatgcacctctccttgcagcgtgtttgtgcggatgttagggaattgaataacgccgtcacgtgtattgcccattcgttcagtagctgcgaactgtttcggtttaaagcccttttgcagcggattgtacaaggtatgcttcagcctgagcggtttgtagagctcttgctccgtgtagacatcaagcggtttgccagtgagtttttcgacaatacacccaagtagaatatatccaatgtcactgtatacgtgttttgtcccggtttgataatcgagcggaattttcgtcaaatattcaatcgttttgtcccgttcttgggaatagtacttaccggctttttccggcgtgtaaaagtaaaagcttgatgggagtcctgattggtgctggaggacatcgatgacacgtatcttgtcttttccttttatgaggtcacccggctgatccttgaaacccggcaaatatgcagaaactttttcatagacgtcaagttttccttggctgactaagcgctgcaatgcaaaatttgttgcgtacatttttgtatttgaggctaagtcaaacatcgtgcgggttttcattttggccggacggcgcagcagttctgatccttcgtactttttactgtagccgtatgctgctttttttatgatgcgtccatccttcaccaccacaagaacggcgcctggaaatcctgctgcaatatcccgttctatcatctgatctaccttctttagcttcttcgtcgagaattgtgcagtttctgcatttatggttttcggctcaaccaagttgtctgctgtttgtgcgaaggtttcatttggcgcgaatatcgatagggttaaaatggcactgaatatgaacagtgtctttgttttcacaggctagcccctttctgtgcttctatcccgtttactatccctaaaacagaaacaatttaatcgaactgagaagccatttcatctttatatccgaatgcataggtcaataaaaagccggccgcgtaggaaataaagagcccaacgatatacaggatgatttgcgaaggcaggactagaaaggaaagcggcagtccggagacaccaatcgcaatggtggctacttgaaaataagcttgaaaggcgccgccgattccagctcctaaacatgctgttaaaaacggacggccaagcggcagcgtgactccgaaaataagcggttcaccaatgccgagcagtcccgatggaagcccgccggcgattgctttcctcagtgttgtttttttcgtcttcacgaaaacggcaaaggccgcgcctacctgtcctgcacctcccatagccaaaatagggagcagaggatcattgccaattgaattgatcagttccatgtgcacaggcgtcaagccttgatgcagtccggttacgacgagaggaaggaaggttgcgcccagaataaagcccgcagcgatgccgccgatgtccaggatggacagtaggccggatgtaatagcatcagaaatgaatccgcctaaaggcataaatacgacatacgttacgattccggtgattaacagtgaaacggtgggtgtgacaatgatatcaagtgattgaggaataaaacggcgaataaattgttcggtgtaagcaatgaatatggctgcgaaaaggacgccgatcagacctcccctgcccgggagaagctcttctccaaataaactgatttttgcgatctccggattgataatcaagatcccggccaaagccccaagtgcgggtgtcccgccaaattctttcgaagcgttaataccgacgagaatgccgagataagtgaacagccctgatccgatgactgtcaggataatcgcaatttgtgagtctgcagagagccagcctgcttgaataattgctttggtaatcccagtaattaaaccggaagcgactagagcgggaataagagggataaaaatgctggcaattttacgtaagaaaagtttaaaaggagtggcatttttccgattgatatcggctttctttttggccgctgcttctttgacatcggcaccttcttctgctgacacgagctttgagaaagcagctgtaacatgattgacgactcctgtgccgaggataatttgtaaggtttcagcttcaacgacccccaatacgccgtcaagctttcttaaaccctgagcatctgctttgctttcatcgtaaggcgtaatgcgcaggcgtgtcatgcaatgcgtatatgaagaaatattggattttcctccgcatagctcaaggattttctgtgcgagatgatggtagttattttctttgctcattaaaacccctccccttcaagatgccttatttttttctcatagattggatggctgctctcgttttatcgatataaccggttgtcgtttcatactgctcagccgccatgcctaaaaacaaaacatcaattataaaaagctgggcgaggcgggaggaagtggccgcacttcgaatcaaggcttcattggaatgggctgtatacaaagggacatcagccagtgcggagacggatgtctgactgaattgtgtgaggctgatcgttgtgatgcctttttccttggccatggcaaacagttcaatgatttcctgtgtctctcctgaaaacgaaatggcgaatacgatgtcgtctttatctgcatttgcaattaaagatgccacaagatgagtgtctgtaaacgcggttgcttgtttatgaatgcgaagccacttttgctgggcgtccttggcgacaatgccggaagcccccaggccgataaaatgcacggtatgagctttgagaagcagagaaaccgctcgttcaagctctttgtagtccatcaggtctgaagtatcctgaatggcttgaatggcattgccggccgttttttcggaaatggagggcagcggctcgtggggaacaatatcccggtagccctgaaacgtaggctttgccagatcgcccgctactctcatttttaaatcttgaaatccttttaaaccgagtgatttgcagagcctgatgacggcagcgtcacttgaattggctaaggcgctgatttcgttgaccgtgctttcgattgctttgtggggatgggctaggatataatctgcaagtttgcgctcggatggagggagcttatgcttcattgattggatgatggctaaaccgcctgtggccattctagttctctccttatcatggatggtaatgttcgattgctttgtcaatgaaaccgtttgcttcatcgagtaatgtctttgcttgtttctgatctgtgcttgttttgagcatgacgattgctgttttgacgtgatgatcggcttgttccagagtgtatctggctgtgtcgtatgaagcgtttgtaaggctttggataatgctgatggcgcgttcttttagttttttgttgctgacgttgacgtctaccatcaagttttcgtaaaccttgccgattttgaccattacagcggtagatatcatgtttagaatcattttatgagcggttgcggctttcatacgtgttgatcctgtaatggcctcaggtccgacgacaacctcaatgctgtgatccgcatccttgctgatggcggaattttcattgcaagtaagggcgatggtgtgtgctccgactttgcgggcgtatcttagggcgcctgcggcgtagggtgtgcggccgcttgctgcgatggcaatgacggtgtcatttgaagtgagctgtatgtttcttaaatcttcagctcctgcttcatcactgtcttcaatgccctctgctgcctgtaaaaaggcttcggggcctccagctatgattccgatgacctgatctgggcttacgctgtaggtgggaggacattcaacagcatccatgacgccgagtctgccacttgtgccggcgcctgtatatatgagccggcctccattttgaaacgattcataagcgcagtctacagctgttttgatgtcggggagaacctcttgaacggctgcagcgactttcatatcttcgttgttgatcattttgaggatgccgagagtgtttgctttgtggatttcaactgtttggctattgcgtgattccgttgtgagacggtgaaggtttaatggttctgacatgaggatgccccctgttttaaaatgatatatctcaatattcagtatattcatttctgttatgatatttcaactatgtttttgaatttttgaaattttatttcactcaagtctataagaaatgatgaaggatcaactgttctccaagcgggccgattcttcgccgtcctttatcaaggaacccgcttttcatataaaggtgttttgcgcgtatgttcagatgattgacggccaagatgatttcgtcgcaccatggaaaatatccgctcacaaaagcgggaagcaaaagcatggcttttttcgcatagccttttccgtgatgcacagcgtttaaagacagggagctgagcagtaaagcaaatggattgttagaataagaagcaagcgtttcttttgatgcatgtaaaatgaaaaaaccgactggaaggtcgtcttttaagatgacaaccgggtatcggtcctgtatgcccagagcctgagacagcacctctttcgggagggaggtaaagcgtttgtcatcgttggtgagcgtgaatgattgaagctcgggcaagtgttcaggcttatagaaggataaagaaatgtcttgagtcatgtggtggcctccttacaatatgtcgtcaagctcgttttccgaaatgacgcggtagcccgcttgttttaacagtgcggcggttactccgctgccggtgatttttttaccagagaatgtgccgttatagataaaaccgcttccgcaagatggactgttttcttttaatatgacggcagaagcgttgatttcttttgcgtaagccaatgttttcgcggcgccttccatatatagttctgtgacgtcttctcctgaagctgtcacgattttcgctgttccattgagaacatcctcgccggtgcctcctatgatttctgcgggttcgcgtggggtagagaagccgccgagaagttcagggcaagccatgactgctttcttttcatcgacgagttttctgattttctccgacgctgcgtgagagccgttatatctgcattcaatgcctccaaggcaagaactgactagaatcatattgggttctcctctcttgctttacttgtctctatcataaaataaatggctttagttgggaggctttttcagttaaaaaaggagttaaaaagtttgaaaataaaaaaattaatttttctctttacaaacagggagtgacctgtatataataacttttgtcagctcgacgagaacacaacggcccgttggtcaagcggttaagacaccgccctttcacggcggtaacacgggttcgaatcccgtacgggtcaccatttggaggattagctcagctgggagagcatctgccttacaagcagagggtcggcggttcgagcccgtcatcctccaccatcttgccggtgtagctcaattggtagagcaactgacttgtaatcagtaggttgggggttcaagtcctcttgccggcactgttttttcaaaattttatgtggaggggtagcgaagtggctaaacgcggcggactgtaaatccgctccctcagggttcggcagttcgaatctgcccccctccaccattattgggctatagccaagcggtaaggcaacggactttgactccgtcatgcgttggttcgaatccagctagcccagtcacagacacctttgatcaaaaggtgtcttttttcttttcgggaaaatcattccaacttctaactgttcagtctgtataataattttaaaaatatgttaaggtagtttattcacgaattaccatctacaccctgccaaaaatttgataaacttattttataaaaaaattgaaaccttttgaaacgaagctcgtatacatacagaccggtgaaggcagaggttagataaatatggaaatgatgattaaaaaaagaattaaacaagtcaaaaaaggcgaccagaatgcatttgcggacatcgtagatatttacaaagataaaatttatcagctttgctaccgtatgcttggcaatgtgcatgaggcggaggatattgcacaggaagctttcatcagagcgtacgttaatatcgacagttttgatattaaccggaaattttcaacttggctttatcgaatcgcgaccaatttgaccattgaccgcattcgcaaaaagaagccggattattacctcgatgcagaggtggctggtacggaaggcttgaccatgtattctcaaatcgccgcagatggtgttttgcctgaagatgcagttgtgtcgctggagctctcaaacacgatacagcagaaaattttaaagcttcctgacaaatacagaacagtcatcgtattaaagtatattgacgaactctcattaattgaaatcggggagattctaaacattcctgtggggactgtgaaaacgcggattcacagaggcagagaggctcttagaaaacaattaagggatctttaagtggggtgatgaaatgagctgtcctgaacaaattgtgcagcttatgcatatgcatcttgatggagatatccttccaaaagatgaacacgtattaaataaacatctggagacatgcgagaaatgcagaaagcatttttacgagatggagaaatccatagcgctcgtacggagcacatcgcatgtcgaagcccccgcggattttaccgctaatgtcatggcaaaattgcctaaggagaagaaaagagcttctgtaaaaagatggttcagatcccatcccgttatcgcagctgctgcggtattcatcattttgatgggcgggggtttttttaacagctggcataatgaccacaatttcagcgtgtccaagcagccgaatcttgtggttcataaccatactgtgaccgtgccagaaggtgagacggtcaaaggtgatgtcactgttaaaaacggcaagctgattattaaaggcaaaatagacggggatgtaaccgtcgtaaacggcgaaaagtatatggcctctgctggacaagtcaccggtcagattgaagaaatcaatcaattattcgactggacatggtacaagatgaagtctgcggggaaaagtgtactcgatgcattcgatccgaacggagaagagtaaagcgcgttagccgctttgctctttttttgtgggctgagagggctggcacatttcacttgctaaatcgaaatgtggtataatgggctcgctatgtaaagtacatatgcgtaacacgtaaaacacaaaatacgaaatgactgaaatcttggaggacgaggaaatggcttttgaggatatcccttttttgcagtacctcggcaatgccgttgatattctccttgtttggtatgtgatatataaattgattatggtgatacgtggcacgaaagcggttcagctgttaaaaggaattgtagtcatcgtgcttgttcgtatggccagccaatatttgggcctcagcacacttcaatggctgatggaccaagcgataacatggggatttttagcaattattattatttttcagcctgagctgagaagagcgcttgaacagctaggccgcggccgctttttttcgaggagcggcacgcctgttgaagaagcgcagcagaaaacgattgaggccattacaaaagcgatcaattatatggcgaaacgccgtataggcgccttgcttaccattgagcgggatactggaatgggggattatattgagaccggcataccactgaatgccaaagtcagctctgagctgctgatcaatatttttatcccaaacaccccgcttcatgacggtgcggtaattatgaaaaataatgaaattgccgcggccgcctgttatctgccgctttctgagagcccgtttatttcaaaagaactgggcacgcgacacagagcggctgtcggtatcagtgaagtaacagacagtttgacgattattgtgtctgaagagaccggcggcgtcagtgtggcaaagaacggcgaccttcacagagagctaacagaagaggcgctgaaagaaatgcttgaagccgagtttaagaaaaacaccagagacacttcttctaaccgctggtattggaggggcaagaaaaatggataaattcttaaacaaccgctgggctgtgaaaatcattgctctgcttttcgcgctcttgctttatgtggcggttaacagcaaccaagcaccgacgccgaaaaaaccgggtgaatctttctttccgacatcaacaactgatgaagcaactctgactgatattccggttaaagcgtattatgatgatgaaaattacgtcgtaacgggtgttccgcaaacggttaatgtcacgataaaaggctcgacaagcgccgtgaaaaaggctcggcagaccaaaaactttgaaatatatgctgatatggaacatttgaaaaccggcacacataaggttgagcttaaggccaaaaacgtgtcggatgggctgacaatctcaattaatccgtctgttacgacagtgaccattcaggaacggacgaccaaaagttttcccgtagaagtggagtactacaacaaaagcaagatgaaaaaaggctattctccggagcagccgattgtcagtccgaaaaatgtgcagattaccggatcgaaaaatgtcatcgataatatttctcttgtaaaagcttcagtgaatttggaaaacgcagatgaaacgattgaaaaggaagcgaaagtgactgtctatgataaagacggaaacgcgcttcctgtcgacgtggagccctcggtcatcaagattaccgttccggtgacaagcccgagtaaaaaagtgccctttaaaattgaacggacaggaagccttcctgacggtgtcagcatagcgaatattgaatccagccccagtgaggtaacggtttacggctcacaggatgtgttggattctcttgaatttattgacggcgtcagcttagatttaagtaaaattaacaaggattccgatatcgaggcagatattccgcttcctgacggtgtcaaaaaaatctcaccgtcaaaggtgactttgcatatagaagtcgacagtgaagcggatcagaagttcgagaatgtccctatcaagactgtagggctgagcagctcacaaaacattgaatttcttgatcctgaatcacaagcgatagatgtaacggctaaaggctctcccacgaatataaaaaagctgaaaaaatcagatattgaattgtatgtgaatgtttcagatttagaggacggggagcatagcgtgaagcttgaagtgaacgggccacagaatgtaacttggtccttggggcgtaaaaacgccaaaatcaagctgacgtctaagaaaagcaatacatcaacgaatgataacagcagcaatacatcagggaaccaggacacagataaacaaacaaatgatcaaaagaacaatcagcaagaagatacaaagaacactgataaaaacaacaacgatcaaaaccaagacgaaaataaagatcaaaaccaagatcaggatgaggatgaatccactgcgaattcacaatcctcatcggaataaaaaaggagcgattataaaatgggcaagtattttggaacagacggtgtaagaggtgtcgccaatagtgagcttacacctgagctggcctttaaagtcggacgtttcggcggttatgtgctgacaaaagacaaacaacgtccaaaagtgctgataggccgcgatacacgcatctccggccatatgctggagggagcccttgtcgccggacttttatccattggcgcagaagtcatgcgcctgggtgttatttctacaccaggtgtatcttatttgacaaaagcgatggatgcagaggcgggcgtcatgatttccgcttctcataacccagtgcaggataacggcatcaaattctttgggggagatggatttaagctttctgatgaacaggaggctgaaattgagcgcctgatggacgaacctgaggataagctgccaagacctgtcggagcagaccttggacttgtaaacgattattttgaaggcggacaaaaatatctgcaattcttaaaacagacagctgatgaagatttcacaggcattcatgtggcattggactgtgccaatggcgcaacgtcatccttggcgacacacctgtttgctgatttagatgcagatgtttctacaatggggacttccccgaacggattaaacattaatgacggcgtcggttcgactcatcccgaagcgctcagcgcgtttgtcaaagagaaaaacgcggatctcggccttgcattcgacggtgacggcgaccgcctgattgctgtcgatgaaaaaggaaatattgtagacggcgaccaaatcatgtacatatgctcaaaacacctgaaatcagagggccgtttaaaggatgatactttggtttcaaccgtgatgagcaacctcggcttctataaggcgctcgaaaaagaaggcatcaaaagcgtacagacagctgtcggcgaccgctacgtagtagaagcaatgaaaaaagacggctacaacgtcggcggagagcagtcaggacatcttattttccttgattacaacacgacaggggacggattattgtctgctattatgctgatgaacactttgaaagccacaggcaagccactgtcagagcttgcagctgaaatgcagaagttcccgcagctgttagtcaatgtgagagtgactgataaatataaagttgaagaaaatgaaaaagtaaaagcagttatttctgaagttgaaaaagaaatgaacggcgacggccggattttggtgcgcccttcaggaactgaaccgctcgtccgtgtcatggctgaagcgaagacgaaagagctgtgcgatgagtatgtcaatcgcattgttgaagtcgtccggtcagaaatgggattagagtaacgaagtctattatcagagagtgaacaagacaagcgaggtttacataagataattgtgagacatacggcaaagttgtttaaaaaacaattgaccgtttatgccacatgttgtaaaatcaagcttgtcttgttcttattttctcaataggaaaagaagacgggattattgctttacctataattatagcgcccgaactaagcgcccggaaaaaggcttagttgacgaggatggaggttatcgaattttcggcggatgcctcccggctgagtgtgcagatcacagccgtaaggatttcttcaaaccaagggggtgactccttgaacaaagagaaatcacatgatcttccaaaaaacatgtaggaggggacgattgaaagtccccttgaaatttgactttcttcgtctccttttacaatcttaggaggaagaaaaatatgtgtggaatcgtaggttatatcggtcagcttgatgcgaaggaaattttattaaaagggttagagaagcttgagtatcgcggttatgactctgctggtattgctgttgccaacgaacagggaatccatgtgttcaaagaaaaaggacgcattgcagatcttcgtgaagttgtggatgccaatgtagaggcgaaagccggaattgggcatactcgctgggctacacacggcgaaccaagctatctgaacgctcacccgcatcaaagcgcactgggccgctttacacttgttcataacggcgtgatcgagaactatgttcagctgaagcaagagtatttgcaagatgtagagctcaaaagtgacaccgatacagaagtagtcgttcaagtaatcgagcaattcgtcaatggaggacttgagacagaagaagcgttccgtaaaacacttacactgttaaaaggctcttatgcaattgctttattcgataacgacaacagagaaacgatttttgtagcgaaaaacaaaagccctctattagtaggtcttggagatacattcaacgtcgtagcatctgatgcaatggcgatgcttcaagtaaccaacgaatatgttgagctgatggataaagaaatggttatcgtcactgatgaccaagttgtcatcaaaaaccttgatggtgacgtgattacacgtgcgtcttatattgctgagcttgatgccagtgatatcgaaaaaggcacgtaccctcactacatgttgaaagaaacggatgagcagcctgttgttatgcgcaaaatcatccaaacgtatcaagatgaaaacggcaagctgtctgtgcctggtgatatcgctgccgctgtagcggaagcggaccgcatctatatcattggctgcggaacaagctaccatgcaggacttgtcggtaaacaatatattgaaatgtgggcaaacgtgccggttgaagtgcatgtagcgagtgaattctcctacaacatgccgcttctgtctaagaaaccgctcttcattttcctttctcaaagcggagaaacagcagacagccgcgcggttctcgttcaagtcaaagcactcggacacaaagccctgacaatcacaaacgtacctggatcaacgctttctcgtgaagctgactatacattgctgcttcatgcaggccctgagatcgctgttgcgtcaacgaaagcatacactgcacaaatcgcagttcttgcggttcttgcttctgtggctgctgacaaaaacggcatcgatatcggatttgacctcgtcaaagaactcggtatcgctgcaaacgcaatggaagctctatgcgaccagaaagacgaaatggaaatgatcgcccgtgaatacctgactgtatccagaaacgctttcttcatcggacgcggccttgactacttcgtatgtgtcgaaggcgcactgaagctgaaagagatttcttacatccaggcagaaggttttgccggcggtgagctaaagcacggaacgattgccttgatcgaacaaggaacaccagtattcgcactggcaactcaagagcacgtaaacctaagcatccgcggaaacgtcaaagaagttgccgctcgcggagcaaacacatgcatcatctcactgaaaggcctagacgatgcggatgacagattcgtactaccggaagtaaacccagcgcttgctccgttggtatctgttgttccattgcagctgatcgcttactatgctgcactgcatcgcggctgtgatgttgataaaccgcgtaaccttgcgaagagtgttactgtggagtaataaatgtttaacccctttggataagattgtctaaaggggtgtttttatgtccaaaagagaaagaacgtctacagtggaaaaatggattaaagaaggtgatgggacaggactcgactatctatcggccatggctatagatttaagatgtttccacattaggtcggtcaatcaggttaaaaggcattaagacttttgcctaactgagttttctaatgttaatacagatataagagagcagttcctcattatgaaacgcttttgatagcagttggaataaagcatgctagaaatccgaaaaccggagagcctattggaatgataacgtgtttttttattgtcaattaataaaggcaaaagaattctagaagtcgcacttacaatgtacttgtgggccttaggttttaaagctcattctttttttattgagtacattccggtttaagttgaaatgattcagtaaaggacacgccataaataaaaggtagcgtatgattgccattctttccatggaaccgatatttctaagatttcatctttcgtaggctttcgattcatattacgtaatatttttatcgaacgaattagacccacatcatcgattggaaaagctgtcgggaacctaaggcagcgcattagaacataattggctgtccaaggaccgattcctcgtattttaattaagtttttttcagcatctttaaagttcattttcattaatttttccctcgataattccccacttgccattaatctggctattccaatgatatattcacttttttttaccgtcattttaatatctgccaggtcggtaggggttaaccgtgcaattcgctcgtacggtgggaacacccaatactttttaccattccattcaatagaatcgccaaatgcttctacaaattgcttctttaaggagtacgcgaaggctaagttaatttgttgccctaaaactccccaacataaagcttcaaataaatcgggaatgccgatcactcgcaacccataaaattttcgggcaggcattttaagtaatggatctgcttttgccatttcataaaatggagttaaatcgttatcaagatcaaaccattcatgaatatattttacaatctcttcccgtttccactgctcaacaggtctagaatcgtttaggaattgaacaatcatttgtttattattgattacgcttacctgcactaaggaccgaatttccccaatggctataacttttgtaatgatattgttctctatttcatacatgcattcatttttttccctggttaggtagccaaggttcgcattcatgtcgaaaatttcaggtaatgtaatgacaataacatcattgacttcatgccatgtcactttttcattctccttatcttaaataattataagaaaactcacgctggttgaaattagtttatcacataataagctttactcattttgttatcttgctattacattctaaccaccttatttttttctatttatgaggttatagtgttagttatcaagaatgctaaacgggagtggattaaaatcgcccaagatataaaaacgtgtgtcgaaaacgtaaattgggattcaagtcaaaatgaattagatgagcattgtaaggaggggtgagataaatgccggatagtatcaataacggacataaagagagccatgatcagagaaccttaaatgatgtagaaatgctaacaaatgaaaagtggcatgcaattataaataatgatgcagcgtacaataatcaatttttctacgctgtaaaatcgacagggatattctgtaaaccatcctgtaaatctcgcgttccgaaaaaagaaaatgtatgtatttttccaaacgcagaacaagctctccacgcaaattttcgcccttgtaaacgttgcaagcccactaatgaaaaaatgcctgatagcgagtgggttgatctaattactgaatacattgataaaaatttcacagaaaaattaacgctagaatcgttagcagatatttgtcatgggagtccgtatcatatgcatcgaacatttaaaaagattaaaggcattacgctggttgagtatatacaacaagttagagtacacgcggctaaaaagtatttgattcagacaaataaagcgattggagatatcgctatatgtgtgggtatagctaacgcgccttattttattactttatttaaaaagaaaactggacagacaccagcacaatttcgtcaaatgagtaaaatggaggaaacgtacaatggaaacaaataaaccaaccctttattggtctttactaatgttcaagaattgggatttttatattgcttcaactttaaaggggcttgtgtttgtaggttcacagaacaaaccaatcgaggaattgttcgaatgggctaagaaacgctttccaggaagtcttcttgttgaagatgatgataagcttgaaccctatgctgttgaaatcactcaatatctagaaggaaagcggaaaaactttactgttccagttgagtacgccggtacgcaatttcagctagccgtctggaatgcactttgtgaaattccttatggacagacgaaatcctattccgacattgcaaatgatataaataaaccagcagctgttcgtgctgtaggtgcggctattggggctaatccggtattaattactgtaccgtgccatcgtgtaataggaaagaatggctcattaactggctatcggggcggatttgaaatgaagacactgctcctcgatctggaaaagcgagcttcatctgaaatggatgttcctcattgaaagtgaatcatctataatgggttggattcttttagaggaaagtaaagaccagtttactgataaacttgacaacttttaaaatttagcatatcttatacgtaacttaataatcgatgcagatgtttatttttccttttaaaatatgtaggcctttagcattcttttcatatttaattttaaatattgataggatgaaaaagtatcctaataaaaaaggaagagaacatgagtcgatttatttgataatcaggactatattaaaggaaatgaaaacatagcataaagtaaagaccaataataaggtagcacttcaaaaaacttcgctgaagttagttgaagtgaagccgacaattttcaggattcaatgatctaacataatcattgaaattttgaagttgtcggcttttttgttggaaaaaaatagagataaataaaaattgaaataaataatagacaaatatgatctgattgaaagatcttttgaccaataatgagttttaaaaaagggagaatttagaatgttagtttcgctgagtttgtcatcattattaacattattttttattatgcttatggcttctgggattagtggactattgtttttacatccgcgagtacccttgagttttgttcgcattcatattgggatcttggctttaccacttttggtttccttactgattcttgccgatagtggtgtgagcggaaatgttggcccttggcacttagattccttagcttgtttaatgactttctttgttcttgcaattggattcatcattcagcgtttttctgtacgttacttaatgggggatcgatcttatcgaaaatattttacgctttttactttcacaacaggagctgcttctatgacatggttaagtggtgatctccgcttgatggttctattttggggagcaactcttgttggtttaaccttacttataaggttaaacagtgcttggcaagtggctagtgaagcagccaaaatttctggccggttatttttgttaagttggttttctttgttttttgcgatgatgtggctttttcatgccacaggtcaatggcagttatcattggttgtaacaaatgaaagtttagctgggctgggagaatgggagagaacagggattcagctattgattgtactggcggtgatcattcctgcagctcaatggccgttccaaagatggttggttgagtctattgttgctcccacccctgtttctgcaattatgcatgcaggtttagtaaatgctggaggaataatactaactcgattttcacctctatttcatggtggtatcgcttcgattattttacttctgcttgctggcatttctgtattgattggaactggaattagtttagttcaggttgattataaacgccagttagtaggctccacgattggacaaatggggtttatgctcattcagtgtgcattaggcgcctatatagcagccattattcatcttattttacatggtttattcaaagctacgttgtttctacaagctggttcagcagtagggcgtcatgaagtatcggctcgcactaatgaaagaacatcctatttatggatcatggctggtcggattttatccttagttataggtgttgctttttggctcactgctcctggagacgggtatcacttaatcagtgcgctgatcttagggtggtcattgtccgtttcttggactcagcttgtcgcttttggagagggccgaattggccgaattgccggcttaactgttttaggaggagcagccctcgtatattttatcattcataaccttttctataagtggctgcatacaaccatttttcaaagtgttcaacctccaatgtcagctgtcatgattgtcgtatgtctcttactatttggcagtgctttaggtacgtgggttgctcgtcatcgttcttccgtttttttcgcggtactctatctttggttagttcgattaggtgaagcaaaaccaaagtcagtagagagtcacccagactaccttaaacaatatatttcataaggagctaatctgagatgggcattacatccgtattaacgaaagataatgtaaaaaagatagatacagatattgatgttcaagaaagggatcttaacgttttcattacatctgccagccgagtgattgcgccactttggcctatttctacatttgctgcacgtaatccgtggatgggacttgaaaaccaaccttttgatcaggttgcaagttggttgaaaaacactcgcgatgttgatatatatcctagtgcgtctatgatccgttcagcaaagaataaaggtgagattgatgaagattttgtggaaatggggctgcagcgttggcttgattcacattcctatcacatcccacgggacgtggcagagcgattttgtcatgctgcattaaagttagatcccctgccttccgaccttttatcatcacatgagctggagaaattagtaagtgaatgtagtggattggatcatatcgagaatgtgtttatgcaaccactaagttcgtatatagagaatcaagatggtgaaaggctagtcaatatactagatcatcatgtcattaagtggagtaaattatatcttgatgactctcaagcaggctggacaatgcctaatcgtgaggaaggtttttatcgtgcttggcagcatctcattcaatatgatccagcacttagtaaaaagcagcgagaaagggtaaaaggttggccgaaagaggcacatttggctttacaggaagctttattcgcactagaaatcccagagtcagaaatccagacttatcttgaaggtcatttactttcattacctggatgggcagggatgatgctttggcgctcccagcaatcgagccacgaacatgcactcctaacagaatatttagcggttcgaatatccatggagtgggctcttataaagccatacttacctttgactaatgaacgatctaagaaaaaaatttcaattgctccccttatagcagcttggattcattggggtgggcttacattagaagaatggtcacagatgacggccattgaacaaaacgaatatttatcatttgcctacagctttgatgagaaacttcgcaagaaactttggttagaagcttgggaacaaacgtacactgatcgattaagccagaagatcatctcgaaacaacgtgaaaccggcggtaaaaaatctgcattagctcaattagcattctgcatcgatgtacgatcagaaccttttcgtcgtcatctagaaaaagaaggcccgtttgaaacgattggtattgctggtttcttcggggtgccgattgcaacttgtgaacttggcagtaaacacagtcatgcttccttgccgatcatacaaaaaccgcaaaataaaataaaagagttcgcagatgaggatgtattcaaaaaatacaatcaacggaagcaagcaattcattctttaagccatacctttaaaacgatgaagcagaatgcgctttcgagcttactactgcctgagctaagtggaccttggcttactctgcaaatggtagcccgtagctttgtgccaagaaaggcgggtcgtttcattcgtaatctccgtgaggcttggttgcgcaaacctgatacaaaactctcgcttcatcatgatactacagaggcagaaatacctgtgggttttactgatgaagaaaaagtgaactatgctcgccaagcattaaaaatgatggggttaacagaaaacatcgcacccttggtcgtgatctgcgggcatggcagtcaaagcactaataatccttattccgcagcccttgattgtggtgcctgcggtggagcggccggtggattcaatgctagagttttagctgctttatgtaatctatcagaggtacgagaagctcttttagctgaaggaattcaaattcctgaggatacggtttttgcagcagctgaacataatacaacagtagatgaattacattggctttatgtaccagagctttccgaagctgcacaagaagcatttgaacaaattgaagccgtgatgccgaaagtgagacatcatgtaaacgcagaacgtctagcccaattaccgaatttccaatcgaagctaaaaaatccgaaggctgaggcaaaccgatttgcggaagattggagtgagatacgtccggaatggggactggctcgtaatgccgcttttattatcggtaaacgtgaactaactcaggattgtgatttggaaggcagagcctttctccataattatgattggaagcaggatgaaagcggtgaactcctagcaaatattattgcaggacctggaactgtagcccaatggattaatttacaatattacgcatcaacggtagcacctcattattatggcagcggaaataaagcaactcaaaccgttactgcaggtctcggcgttatgcaggggaatgcaagcgatttgttagccggactgccttggcaatccgtcatggaatcagatcacgaggcctatcattctcctcttcgtttattgatactcatccaagcacctagagaatatgtagaacggttattaaataatgattcagcatttctgcaaaaagttcaaaatggatgggtccgactggctagtcttgatccagaaggatgttgggaaagctggtaatgatgaatctaagcatttatcaaatggatttgttattcaaaataaaaatgataaacataaggaagaggtgtgctgtatgaatgtaaaccaaaataaaaaagtattatttttgacggatattgaaaacggtttggagcctattttacaagaagcgactaacacttctgcagagaatatgttgactatacaaagctatggtgccggtatttcacatccttatggagaaatcatgaggtctgttatttttgcgatttaccaggaagatgttgaggagatttttgtagtaggaacaaaagataagaagacttccgcaggtaatggactaactcaacttgaaacaatgaaagataaaatacaaacattggattatctttttcaaaattgcaagcctgaatttttaggtggtacggtcgatgaatggctaaatgaaaatagcagtgacaccattgaaaaaagtgttgatatgattcgacatcatcccctagtgccgtcatatgttaaagttagaggtttattcgttcatcataaggatggaaaaccctcaatcgcggagggtcctgatgctaaaacaggtcaagccatacctgatcattgcttgtcacgatgaaatacaggttcaacttctaaacgcacccatatatggagaaagcagttctaaggagattgtatgagcgctaatttaactgattttgtcacgaaaacaatagaggacatgaactcgtttgatcgtgaaaatatggaatttatgaaaaaactaattagaaaagcaattgatttttatcatctaaagtcttatgaagaagttgaggaaacccattcaggaaatgttcgatttttgcatgtccactctatgatggaagaaaatatgttatccaaaatgatagtggtcacaagaaacggtaaaactgatttggatattgaaggtgtatatgaaggatatgttgtaagagaatattaatgagacgaaatcacaaatagaatatgccaatttttttgctcaggagatgtattagatatgaaaaagtctaagggttctattgaatcagagatcagtaagtccattactcaatgggagaaggattatcttgggcgggggtctgtatctgttaagactgatatactgcgggacatgatcatcgtcaatttaaaagggattttaacaccagccgaatatgtagtttgtggatcaaaagagggtatgttatctatcaaacaaactcgttcggagttagttgaatcaggtatagaaggccttaaggatattatcttaaaaataaccggagaaaaagtgaaaagttttcatactgatttaagctcccggacaggtgaacgagtgatggtatttaaattatgtaatgatctagagaaaaatttggaaaagatcttataatctaaagaaaataaatgttaagacggtatggaatttgttgtgaattgaacataaagaactgccgattcttttgttttacaattatggtatcattgataacttttattcatatcctaagcggacataaagagatatcaattcatagtacactgttgtgttattcctgtcgaaagatctaacatccgctgttgttatgagcggatgtttttttacatctattttaaatacatgaatttgatgctggtgattagtcacttgaacaatatttgaaaacatccttgtcacctgccgggtttccccaagtgtttagtgacatgattatgagaccaatttcgtaaagcttgctgataaatttaagcggtgaacaaaattgatatgctgtcttcagtttcatttcacggaattagtcagagataaacctttaattaaatatatccaaaaaacggattgacatatcgaaatataacgatataataatcgatatggaaccaattgaagtattcaaagccttatcaaatgaatcaaggctgcaaattttgcaatggctgaaggaaccggatcgtcattttgcaccccatgaagggattgatatgaacacaatcggggtatgtgtcagtcaaataacagacaaattgaaaatgacgcaatcgacggcttcccaatatcttaccatccttttaagagccggcctaattaaggcggagcgtattggaaagtacacatattacaaaagagatgaagaagccattgggaaacttgctgactttcttaaaacagagatataaaaataaacatcaaaagatgtttatttttacaccatacatatcgacatattacgatgtgtttattttttataataacatatcgataattcgtgatatgtttattaataattaaggagtgaatgttttatgtctaacacttggaaaatttatattttagccattgtcagctttttagttggaacctcagagtacatcatttccggaattttggatcaaattgctcatactctcgggatcactttagctgccgcgggccagtttattaccattttttcacttgtatatgctctttctacacccgtacttatggcgttgacagcaagtatggatagacgcaaattgatgatgtatgccctaggtttgtttgtgttcggtaatgtcctggcttttgtattgcctggttatggatggtttattgcagcgcggatcattatggcgatgggagcaggtgtggtggttgtcaccgcattaacgattgccgctaagattgcatcggaagggaagcagggaagtgccatcgctacggtcgtgatgggatttaccgcttctttaatcattggtgttccgcttggaagaatgatagcagtagcattaggctggaagtctgtatttggagccattgctttgttgggattgatcgcaatggtcgttattttctttactcttccgcatactgaaggggataagcctgtgcctttgcttcaacagcttgctcttttcaaaaaacggaaagtggctatgggattatcaatcactttcttctggctcgggggatattctgttgcttacacttatttgtcaccgtatctcttgaacatctcaggtataaacggcaacttgcttagcggtgttttgcttatatttggaattgccagtttggttggatcaaagtttgggggatatagcaccgataaatggggagtgccctttacactcgttggcgggatgacgttgcatatcgtcacactgattcttctgtcacttgtcactcattcctatatcggagtgttggtgattctcatattatggtcgtttgccgcatggtccaccggtccgacacagcaatttcacctggctacaatagaaccggaaatgtcaggtgttttgcttagcatgaatcagtcaatgatgcaattcgccatggcggtcggcgcaggtataggaggggtttttgtggaaaacgtatcattggcctcgattacctgggttggtgcgttaggggttatgattgccattattgcatcattgctgattttcaattcgcaaccgaaacaagcgctaaaagatatcaatcaataatttcgaaagatctaacatccgctcgttatacaagcgggtgtttttttataggctcaagtagaaggcacactgaagctgaaagggatttttgccgacggagagcagaagcacagcaagttataatatactaggaagggaaataacggtatggcagaagggttctagcgcttctcgcctgtaagatcattactttgaggatgtgtcatcgtgaatcaaaagacgtacattgaaatgagcaggacatcgcagtacatcaacaaaatgagagagtattcagtgctaattgatggggctgagatgggaactatcaaagatggaggaaggctgcgaattgatttaccgcctggtgagcatgttattcaagtgaagattgcttggtgtacaagcccaactttgaggtttactttagcggaaggagaagtgttgaagtttagatgcggaagtccgcttcgaggttggaagttgcttttggcacttttttctgttttgggccgtcctgaaaattatctgtttatcgagcaggaagaagagaaaaaagctttgtggtgactgtatgttactacatggataaatatcgctgaattctgttttgtgaaagtttaattgacataagaaagaatggcagccttctcaatatcgtgctccttagagcaggctgtcaataaggaattctcggttgtcaattttcataaattcattgagaaactaaatactccttaatcaattgccacctgtcacgagcatgcatgatgaactccgatgcaatggctacaaccaggtttttctccggaacacagcaaatcacattcccgccatcgcctagtgctgagtatgagaaaacgccgtcctcatcactcagccaccatagataaccgtagttattggggtttatctctgttgattcgtcaatccatgatctccgaatgatctgttgattgttccaagtaccatggttcaaatatagataaccaaaccgagccatatcccgtggagtcagcgtaagtccccatcctccggttgagttgccgtccgggtacctctcacatgtttaccgaatagatcgtcaaagctgaatgatttcatttcataatgcggaatttctttcatgccgatcggtttaaataagtactcgttggcaaattcgcgggcgcttttgcctgtggtgcgggtgatgatggctgacagcaggtgtacgcctgcggtggagtatttaaatgtgccgatttttcctccttgacccagcataccgagcgtataggcgatccaatctggctgcatgcacatcttatcgagcggttcttgccagtcttcaaatggatagggagctgtcattgtgagaaagtggtgtcttgtttttgtttattaggagtattcgacacattctgggaaagaagcagtgttttccgaataaatccagctccaagaaaccaaatctaataaatggatctataaaaacgttaaaatcaaaagaactaatatatataggctaacgaaagagatatatcattttttgaaaaatagttttgattgcttatagttgacgagtattaagtgaaaacaatccaaaaaagtccctaacctaaattttaaatattaataattagatgcggttagagaaaaataagttaaatatttgaaaaaaatgttgaaaaaagacatataaaatgatattattacctatataagtaattaatttcttaaggaggaacgaaaatgaagaaaaaaattgctgcatttctactattaacaatagtagcgataagcacgataattcctgtcacagtatctgctggaagcggggaaaagtggaactatggttatgacaaaaagaaaatgcaggattacaatgattactaccattggctttatcgtcacaattcgtcaataacaaaaaaaggtataaattatccaggtcgtattgcccaacctaaatattggtccaaattaagactcgattataccggtccttataaagtttcctaccacaaacacgtttacaaatagaaaatttttcaaaagggatttatattataaaatataagtcccttttgcattaagataaataaggagaaaatatgattgaaataaaaaatatgaacaaatcattcaatgaaagaaaaatttttgaaaacttaaatttggttattgaacctggggagtttattggaattattggaaagagtggaaagggaaaaactacactgctaaatataattggcacgttagaaaaagcagatagtggttctgtaaaaatattagatagggatataaatagaaaaagaaataaaagatatttacttagacatcacttaggatttatatttcaaaactatgcattaattgataatgcatctgtgaatgagaatctagaaatcgcacttaaacataagaagatgaatagacaacaaaaaagaactgctatgtcttctgcattaaaagaagttggtttagataactatggtaaagaaaaagttcatactttaagtggtggggaacaacaacgcgttgccattgcaaggctgctgcttaaaaatcctactttgattttagctgatgaacctacgggatcattggatactgaaaacagagatattataatatctctttttcaaaaactacataaacaagagaagacaatcattatggtaactcacgataaagaactaataaaaattttttcaagaactctacaattataaagggggaatagattgtgaaaaaattattattccttctcgttattactacctttatagttgtaagtttcctatcgataaagcaatttgaatatttacagtttcaatcttttaatcataataatgttcatgattcatggaatgttgttatagatgaagggaattctaaaatcggtaaaaaagataattttaaaatgttggaacaaatagcatttgaatctaaagttaatttgcaacgcatatcatatgaaaatgataataataaagataaagtagtgtattatgttgttctctataatgcaccagaatattttaaagatctaaaactaagatatggggaatttttgcaaagtaatagtagttctaatgattttctatctactgttcaaacaaagaataagcatcagataggaacattagagatatttcatagttttgaacctattgaaattaggccaatgattgctgcggaaaaaacaaaagatattaaaggtacctatactgtaataggtgaaaaacatgctgaaaattttaagaaaatcgcattacagcatggtttttcaattaagttatccaaaaatgaagattcacaaagtgtgagtacaccatatccttatcaggaaatgatgtatataagctcattgattttatgcttattaataatgcttacaatattatatgatgtaagtaataactataaagaaattgctgttaggtatatgttgggatgtaatttatttcatataggaatatatctattcagaaaatatattcctatcattataagttccttgcttgttggaagtttaggtttaatattatatttatattggtataatcactatcaacaattcattgagttcgtatattttttatcgaaaaacattgctctgttatcaataatacttacaatcatttttttaataatatggtttagtactggaagtatcaatatcccacaaatgattaaaaataaaaaaccagtaagaatgtttttttatttaaatattattgtgcgctttgtactggcagtttttctattgttaggtttagagcaggggattagcaaatttcaggtgttaaaaagtacggtttcgaatcaagaaaaatggtctttgttaaaacaatattcttatttagggatgatagcttcaccagagcaaaaacaagaaactcttaattttcaaaaagataaagaagagcgaaaaaaaattcaacttttctataaaaaactagaatcccaaggggcgttttttatatatccttcggacttttactcgaatgattcacaaattacatctcaagacataaatccatggggagaagagggaagaaaagtagaaataaataagaattatttatcggttaatatgataaaagatatacatggaaaagatgtggggataccttcctctaataaagatgtaataaatgtgttagtaccaataaaatttaaaatgtataaagaagatattgaaagatcattagcagaagattataaaggtatatacgatataaaacgcgctgctcctgtaaaaataaatattatctatgtccagaataaccaatcttattttacgttttctacaaattcagctcaaaacagtaactataagattgtagatccgattgccgtaatagttaataataaatttgaccctttgatactagctaataatatttctatggggtatggtttttataccaaaattagtgaaggtaaagatcctttcaaaataataaaaagaacattagaggaatatgaattaaacaacatatggagccctgtatctattgcttattcaaatgtcgaattaaaaatagccaatgataaagaagcattacagttaacggctatatattgtggggtatttcttttgttagctgtagtattattaattttttcggcagtttattacttagaaatgaacaaaaagctattatcaatacaatggatatttggttatagcttttttgagaagcattgtttggtctatctctcggtgttggttttctggagtctgacttttatggttagcttttatgtatctggaaatattgcgttattgggtgaaatttccttatggttggcgattttagacatattattaacaagtatattattgattatgagagaatataatgttactaaacaagtcttaattaaagagtgattagtacaaataattgggggtaaacatttttgaaaagaaaaataaaatttcttacgatttgtttagcgtttgcattattatgtctaattatagctgcctattctatctcaacgaataaaccggatgatgaaaataatattaacaaaaatcaagttggaaaaacacaaaaacaagatagttcatattcagataatatggtatctgatcaagataataaatactatgtcatctatataaaacagaagaatggaacaggctcatcatttgtgcctgaaaagcttaatcctggtttcaaaaatgactctgatgattttaacgtaagtatttcctttgatgataaagggaacgtaattaataatgataaggtaattgaagtggaagacttctcactatcaaatactaataagaaaaaaattagaaaaatagttggtacaaataaatatgatgcagctttgaaagaagttgaagatcgagtgttagagactaagaaagaattagaagaaaattccaataattagtaaatatacaattagcagtattgaccgctgtaaataagaggcggtctttttgcttagaattaaatatttactaggtttaatagaaatttattttcatatcgtatccttttcgtattacgtgaaaggagcactatgaaagttgtactgactatagtttaccttctagacggagaataaaaaagagccggataaccggctcggtataagttaaaactgctttgttacgtcgtattcataatctatttttgcttttacgttgctcatcgtcgatctggctgtcgctaatgtattatatttaaaactccatacctttgccacactgagttgatctgacaaagagatatcataagaccctgaagtcgagctgtttacaagagcacggcgccattcgttgttttcgctcgtcatgatcaggtggcgtgtatttccctggcttggtgtttgagtggcggttgtctgaactctggttacaatggcatcacgcggtatcccagattggtttgttaaatcaaccttgatcacgctggagtcagaacctgaggggctaaggcttgtatttcctttattttcagcaatgccgctgaattggaatgttccgctgcctgatttgattcggtcttcaattgaaagtgtaaaatacatgtttccggtataggtgcctcgtgacactttcacataaaaggtatccgtcgtgttttgggcgtctgcatttgcataaataaaagaagaaaacgtattagggttaatgacttctgtcccttgagaaacaggtattctattcttatcataaatttcaattttcatccctgtatacgcgctctggtatgtactcctcacgtatactttttctcccttattagccgtaaaagtgaaataggcttcatcttgaccagcttccagtattgttgtatcgatatttttatatttccaataaccgatcggcattgcggtatcaaatgaattgtttcctgtgatagcagtgactccgacagctgatgccgaatacgtaaaggtgaataagacagacagcataacagcgaatggaataagccattttttcaccatgcaaacaacctccttttatttccatcatacataataacgatttaggtgtaaataaatgttttttgaggttaatatatacattatctttgccgataaaaaagaataagagagaatactcgggagggaattcaatgcgtctgaatcggcaatttatccgcactcagctgatggcacagaacatattgagcaagaatgcgcctgccaaacgggagaatgcgactgaaaatccagcggcagttctggaaaaggcatacagcaggcttaagtcacaatcttcaactgggggaatcaatcagttcaattattctaaaaccagcgtgtcgggaaacagcggggcgttcagcaaagtgtatcaatcagcgaatgatcgaacagtgacagacacaggggaagaaacagtgattcaatcccaaaacccctatgaatctgagagtgatatcagaatcaaaatactagatgaaaaatacagcaggatgaatgcgattaataaaacaaagtctgatccattaggctatattaaggataagtaccaaaattcaaagtctccttatttcagaagtgatctgtcagctgcagaaagacaggccgcttacgataatgaaacagaatggttattcaaagggaaggcgcaaaactataaccttcaggatgctgtgtttcggaatgtcacatttcatggggaagtggaagctgagaatgaaaaggtgtatcagcggggacaggttaaccagcagctgcaagtactgttgaatcgaaaccatattcatattccagaggggacagagctgacgtttacaatcacaccgattgactatcaggtgcgggtaagcgggacagacgatcaggatctgatcaagcaaattgagcaagtgctgcaatctggagacaacagcaaagaactatttttgcacatcatgaaaagccaaagcagtgattcagcacaattttccgaagaggcctatcaaaagtatcaggctgctcgtgagatgtatgaagttacaggctaccatttgaaggatttagaagtgattgatgggcggtacgtcacgcctgagggacgtgacttaatggatgtatataaggaagagcttgaaaaagatccagtgcagaaacaaacggcttcttatgctatatcttactatcgttcagagctcagtaaaatcgcggaagccgggtataatgccattccggatttcatcctatcaattgattacagcaatggatctctgagagatgtgggacaaagcaagagctatgggaccggagataccgggtggcttgaagcattaaagcgtcaaacgggtgtgaattattaggtaagctgttcatgtaggacagcttattttttatgagaatctaaggggtgaattaatcccaatattcaaataattttattatttttatataaaagattttaaaagaagtgaacgattcaaaactctgaacaaaggtgtttgcctgaaaaaaacaattgtattttccagagaaatttattatgatgaaataagtaatttaggagattatataacaattttaagtttgaattttctgattgttatcactgattcatgtgaaggcaagcaggtctgctgttttctcatttatgagtattttgttaggaggaggaagaggagtggcaaataaagaattaaagaggggcctgggcgcgcgccatattcagatgatcgccttgggcggtacaatcggtgttggcttgtttatgggttctgccagcacgatttcatggactggcccatctgtccttctggcttatgcaatatgcggaatttttatcttttttattatgcgtgcgatgggtgaaatgctgtatgtcgagccgagcacaggttcttttgcgacgttcggccatcaatatattcatccgatggcaggttatataacagcatggagcaactggttccagtggattatcgtcggcatgtcagaaattatcgctgtcggttcttatatgaagtattggttcccggatttgcctgcttggatacctggtatcgtggcaatggtgattcttggtgcggcgaatttaatttctgttaagtcgtttggcgaatttgagttttggtttgcgatgattaaaatcgtgacgattatcttgatgattattgcgggaatcggaattattttcttcggttttggcaatggcggagatgcgatcggtttgtcgaacctgtggtctcacgggggcttctttgcaggaggtttctcaggtttcttctttgcactgtctcttgtcattgcagcctatcaaggagttgagctgatcgggattacagcgggtgaagcgaaggacccgcaaaacacgctaagaaatgcgattcaaagtattatctggcgtattttgattttctacattggcgctatttttgtgatcgtgacggtgtatccttgggatgagctcaactcactcggaagtccgtttgtgtctacgttctcgaaaattggaattacggcagcggccggcattattaactttgtcgtgattactgcggcaatgtccggctgtaacagcggtattttcagcgcgggccgcatgctgtatacactgggtgtcaatggacaagcaccgaaattctttaagaagatttcacgcaatggtgtgccgctgtatggcacaattgcggtgctgatcggtttggctgtcggcgttgtactgaactatatcgcgccgccgaagatctttgtctatgtatacagcgcaagcgtgctcccagggatgattccttggtttatcattttgatcagccatatcggattcagaaaagcgaagggtgctgcattagataaacatccattcaaaatgccgtttgctccttttacaaactatttgacgattgctttcttgctgatggttctggttggcatgtggtttaacgatgatactcgtatctccctgattgtaggcgtgattttcttagcgcttgtggtcattagttattatgtgtttgggattggcaaacgcacgcaggccaatttgacaaaaagcgaacaagcagctgaataacgataaaaaagagacattcacggatgtctctttttttatttttcgcgtatggattttccctattttagcaagctatagggtaaagatagcagaaggaaaggtgttcataaaatggatgttacactcggttatttgcgcgaatcactttcgaatcatctagaaaatgaagtctgccagcgtatttgcaagaagatgctggcgaagcgttatgcaaatgaaggggaatttgtaaaagacttagatgataatgaaatgtcttttttgaaccatgtattagaaaaagaaattaagtatgcccagaatgaacaggatcaaaaacgggccaaggaattaaacgaggtgtatgaattactgctttgagaaaggcgggtaagaaatgggagcaattgaacgaagcggatatacatttcagccggagtttagcgttgtccgtcaaaacggagccatccatgtgtaccatcaaggagagtttgtggaagaaatcgaatttgaatttaacggggaatatcccgatcatgatttgattgaagagcttgtgaatcattattgttttgagcatgaaatttagagccctgccgtgcagggctcttttatttaggatgtgatcaggccatactttttcaggatatccacggtgatgtttttggcttttgtgccggaatcatcgacattggtgacaaagacataagagccatgctctgttttgatgaatccgacaaaccatcctaatcccatatctgtcaggcgagttccggttttcccgtagagcgtgtaatgatcgccttcctcttgaatcatcatgcgcttgacggttttcattaccggcttgtcaaatggaagctccttgttagccagtttctccaaaaaagtttcttgttccagcggagatattgtgagcgagctttgcagccaaaactggtcgattcccccgctgatatcctcgttgccgtaagatagtgtatgaagccatgttttcattctttcctcgccgatatctctcgctaatgcctgataataccagattgcggattcgcgcatggccgagccaagcgtatggtcgcggttccatgattcgaattcacgcttgaccccgtcccatcgttttacatcgtattcatctcttacagctttgacctgcaagccgattaaagcgttcacgactttaaaggtggattgcggagtttgtctttgatttgcccgttttctgttatagacaaatgtctgatccttttgtaaatcgtgaagaatgaaggttccatccgtatccttgaattcgtcatcgacattcattctgctgacattcaagtgtttttcatgagcagatgatgctgcgtggacggagaagccgccgatccctgcaatactcagcacaagcacaatatatatccattttttcattttgttctcccctttgttttgattaactaccttttctctctttcgtttgttcttcctttaaaaaataatcaaaaagcgcttaaatttggttttgtaaacaaatactgttactgggtttatagtcggaagataacgtgaaaatagagggtaaaaaggaaggcagggtaagcggatgaatgagcagattccacatgacaaaagtctcgataacagtctgacactgctgaaggaagggtatttatttattaaaaacagaacagagcgctacaattcagatctgtttcaggcccgtttgttgggaaaaaactttatttgcatgactggcgctgaggcggcgaaggtgttttatgatacggatcgattccagcggcagaacgctttgcctaagcgggtgcagaaatcgctgtttggtgttaatgcgattcagggaatggatggcagcgcgcatatccatcggaagatgctttttctgtcattgatgacaccgccgcatcaaaaacgtttggctgagttgatgacagaggagtggaaagcagcagtcacaagatggcagaaggcagatgaggttgtgttatttgaagaagcaaaagaaatcctgtgccgggtagcgtgctattgggcaggtgttccgttgaaggaaacggaagtcaaagagagagcggatgacttcattgacatggtcgacgcgttcggtgctgtgggaccgcggcattggaagggaagaagagcaaggccgcgtgcggaagagtggattgaagtcatgattgaagatgctcgtgccggcttgctgaaaacgactcccggaacagcgctgcatgaaatggcttttcacacacaagaagatggaagccagctggattcccgcatggcagccattgagctgattaatgtactgcggcctattgtcgccatttcttactttctggtgttttcagctttggcgcttcatgagcatccgaagtataaggaatggctgcggtctggaaacagccgggaaagagaaatgtttgtgcaggaggtccgcagatattatccgttcggcccgtttttaggggcgcttgtcaaaaaagattttgtatggaataactgtgagtttaaaaagggcacatcggtgctgcttgatttatatggaacgaaccacgaccctcgtctatgggatcatcccgatgaattccggccggaacgatttgcggagcgggaagaaaatccgtttgatatgattcctcaaggcggggggcacgccgagaaaggccaccgctgtccaggggaaggcattacaattgaagtcatgaaagcgagcctggatttcctcgtccatcagattgaatacgatgttccggaacaatcactgcattacagtctcgccagaatgccgtcattgcctgaaagcggcttcgtaatgagcggaatcagacgaaaaagttaaattaaaaagctctcttcctttatcgaagagagctttttgattacttctttttttcatcgtagtattggacgggatacatggagccttctgataccattttgttgtcctcgatatcttgcgggtccgggtggccggctttatcaactgggaacgtttccatgtctggctgttttgttattttcatcttcatgctgtgaatgaattctcttgccttttggcgatttgacgggtcttttaatagataagaagtgatgccgacagttgaaacagcgagacctgaaagtaacagcttttgtttcatggtgatactcctttctattttaagaatagtgtttcctgtatcattcccgttttggaaatagctaaacctattgtgtttttatcgtttggattaacagtaaattccatttaagaagaaactagtgacttcattcctgtattggaaggtaatatacattgacttattatcgtttcagtcaaaattcgataaatattgacaaagtaaagtaatcagaataataatataattagtaagagaatgtcatcatacatgaaaggtgtttacgatatgaatcaattgcatcgaagaatgggaacgttttccctcatgatggtcgggctcgggtcgatgatcggttcaggctggctgttcggggcttggcgtgcggctcaaatagcaggaccagctgctattatttcatgggttattggaatggtcgtcattttatttattgctctttcttatagtgaactaggttctatgttccctgaagcggggggaatggtaaaatatacgcaatattcacacggttcgtttatcggttttattgcgggttgggccaactggattgcgattgtgtccgtcattccggttgaagcggtggcctccgttcaatatatgagttcttggccatgggaatgggcgaaatggacaagcggtttggtgaagaatggaacgctgactggggaaggactagcgtttgcctctgtattgcttctcatttattttctgctgaactattggacagtcaatctattttcgaaagcgaattcattaattacgatttttaaaattattattccgggtcttacgattggagctttgctgtttgtcggattccacggagaaaactttactggcggtcaaagcattgcgccgaatggctgggcaagtgtgctgacggcggttgccacttccggtatcgtttttgcgtttaacggtttccaaagcccgattaatatggcgggtgaagcaaaaaatccggggaaatcaattccgattgcggttgtcggctctcttttcgttgcgacagtgatttatgtcctgctgcagatcgccttcatcggagcggtgaatccttctgatattgctcacggctggagccatttgaattttaattctccttttgctgatctggcgattgcgctgaatattaactggctagttattgtgttatatgcggatgcatttgtatcaccgtctggaacagggattacgtatacggcgacaacgtcccgaatgatttacggaatggaaaaaaacaaatacatgccgagtatattcgggaagcttcatccgatttacggcgttccgcgacaagcaatgttctttaacttgattgtgtcgttcatctttttgttcctgttcagagggtggggcgtattagcggaaattatttccgttgctacgttaatttcttatatcaccggcccgatcacagttatgacattgagacggacggggaaagacctgtacaggcctcttcgtttaaaaggcttaaacgtgattgcgccgcttggatttatctttgcgtcactggtgctgtattgggcgcgctggccgttaacagggcaggttctgtttattatcctgatcggtcttccgatttatttctattatcaggcgaaggcgaaatggaaagggtttggccggaactttaaagccggcgtctggatggtgttttatctgctggccatgatggtcatttcttatttgggcagtgataaattcggcggcctgaatgtcattcattatggctgggatatggttctgattgcgatggtatcacttgtattctatgtgtgggcgctgaagagcggctaccagacagaatacttaaaggatgcgaaagagataaattctcagctgcttaatggacagtcagaagctgctgccggaaaagaataaaataaataagaaaaccttgcgatagttgtcgcaaggttttttgcttttaataacccttttttactttgtggaaaagatcaggatagttggtgaacactcctgttacgccccaatcaagcaggcgatgcatatcagcttcattattgactgtgtaaggatgaagcaggaggccgtggctgcggatcatacggacgttttcttgatttaaagctttataatccgggcccgcaccgacagcgtatgttttgatttcttccagggcagcatctgtcattgacgccatttgtttggcttccagcaattgaacggtcggcaggtttggctgtaattgatggatttttaccaggctttctttgctgaacgattgaatgatcacctggcctggcttagaatgcttccccagtaatttatgtttctgcaaagaagcgatcagtttttcttccatacctgggtaggtgtcaggcgattttgtttcaatatagtagttcgcgtgctttccgaaacggtctaatacctcttctaatgtaggaactttaaggccgacgtactgcggctttgctttttccggataggcttcattaaaccaagaaccggcgtcaagcttcttaatgtctgcgagcgtatggtctttcacccagcccgttccggttgtggtgcggtccagtttttcgtcatgcatgacaatcaatttcccgtcttttgtcatttgcagatccaattcaatataatcagccttcattttctgagcggtttcgtaagacagaatcgtgtgctcaggcacatatccagaagcccctctgtgcgcgacggtcaggatacggtcaggtgacagcaggtttccttttgacgctgccgacactggcgttaccataaatgagagtaagcccagcgacagaacaaacaaggccagtattctattttttctcatgatttctcctccttatagataagcactacctgtctttcatattaaaaaacggatgtaaacggcgtgttggaaaactattaatcttttatgtgtctttcttaaacatgctctgcccgttttcctgtattccacgtcaaagccaagaagacgatggcaagaatacaggatgagatcagcatgataaagccgccgttccagttaaaacggtccacgacaaagcccataatggcgtttgcgaaggcggatccgccgatgtatccgaaaaatccggtcaaaccggctgcagttccggctgcttttttcggtgctagatcgatcgcttgcaggccgatcagcataacaggtccgtagattaagaagccaatgctgatcagggcgatattgtctacgagcggattgccggccggattcagccagtacaccaatacggcaatgaaaacacccgccataaacaaaacgcctgccggtgcccggcggcttttgaagaatcggtcactgatccagccgcacaagatcgttcccggtatgcctgcgtattcgtaaagaaaatacgaccagcgtgagtcttcaggagaaaagcctttggcttctgttaagtaagtaggcgcccagtcaaccacgccgtatcgcacgaaataaacaaatacattggcaaaagcgatgtaccaaagaaatttgttgttcagcacatattgaaaaagaatttcttttgttgttaattctttttcctgatttttaaaagcgtgttttggatagtcattccgatactcttcaattggcgggagtccgcaggattgaggcgtatcacgaaccaataaaacaattaaaaatgaaatgataatggcgatgatggcagggaagaaaaacacgcttttccaagtgacgaacatcgcgatcccaagagtcacaagcggagcaagaataccgccccctatgttatgggcgacattccagatcgacatttttgtgccgcgttcacttatggagaaccaatgggccatcgtcctgccgcatggcggccagcccattccttgaaaccatccgttgataaacataaaaataaacatgatggtgacgctcgaagtcacccaaggcattgaaacgaatagaatattaacgattgctgataaaaataggcctgtcgccagaaaatatctcggattacagcggtcagacaccattcccatgatgaatttgctgaagccgtacgcaatggacacagcggccagcaccaaacccagttctgttttcgaaaatccctgttcctgcagataaggaatggcaaaggcaaagtttttccgcagcaggtagtagcctgcgtagccaatgaaaataccaatgaatacttgcagtctgagccgtttgtatgccgcatccatctttgaatcatccagtctctcaatatgaggagccggtttaaatatattaagcattaaaattatccccctttgctgtttgtgctggatgtgtggcgtgcctcctttcccgaaaaacaaaaagagccagaaaacaccccttgtcaaaaggggttggattcctggctctcctcatctccatccaagctattaacttatcatgatagcgctttcttaaattatcatagtccggagcgaatgtaaacgggtaattttcaaattgggccttagggaagtaaatattatccttttactaaatgcagttatgtttttttactagtaacataaaaatctggagggaggctgtttaaaggtggatgaattagatatcgcattctttattttaccgttaggaattatgctgctatcgattgtcgggacctgtatttgtaaaaatccgtatctgatgccaatgcttagtttggtgatttctcttgtgctcacctttaccatttttattgaatcatttttgggatgggctgttgtctatagcttggtttctctggctttatcctatatcacattgattgtggtaaggaaaaggaaggaatcaggaaattaaaaagacctcactttctaacatatcgttgactaaggcaactatatgtgattataattggcttagtcaacaatattagaaagtggggattgatttgaaaacaagagaatcatctgtcggattaaaattcagaaagttcaatcgattttatacaaacgtccttggtttccttaatgagcacatttacgacagcccgttttccttaacagaaacacggattttatttgagatttataatacgcctaattgtacggcaaaagctcttcaggataagctggggcttgaccggggatatgtcagcaggattgtgaagcagtttgaaaaagaagatttgatctataaacagaggagcaaagatgacgcccgccaccattatatttttgtcacagaaacaggaaaaacgatttataaaaagctggaggagaaagccaacgaacaagtagaactgatgctgaatgaaatcaaccaaaaggagcagcacaagcttgccgaggcgatggcagagattgaagcgatcctttcacagtcgctttctgccagatcatcagagatatcgattagagattattttctctcggaggatcttcaactccttattgagaaacaaagacaattttacgcggaggctcacggttgggatgacacgtttttagcttatcttcaggagacatttgacgctgaaatcgaaaaaatatggattgcggaaagcggcgggaaatttgccggctctgtcgggttggtcaagcatgatgaaaagacagttcagctcagatggtttctggttgattcggattttcggggcagggggctcggcacgcaattgctggagcatctggttgcatactgccaagacatgaagtttgaccgcattttcctttggacggtgagtaccatggctgaggctcgtccgctctatgaaaaatttggattcaagataagtgaagtgaaacaagaagcgccattatggggacagcagctgacagaagaacggtgggatttggagctgtcatgaaaagactgcattatgcttgggtcatcgtctccgtcaccttcttgatcttattggcggttcagggggtgcggctgtcatttggtgcgtttgtggagccgtgggaacggcagttttcaatggatagaagcaccatctcgctgatttcgacgatgagttttattgtttatggcatatcacagcctgtgattgggcggcttgtggacaaatggggtgctcgggctgttttggcatggagtgcgttactgacaggagtcagcattttcttaacataccttgtgacttcgccttgggagctgtttttgctttacgggctgggtgtctcgcttggagttggcggagcatcgaatgtggcggcaagtgtattggtcgtcaattggttcagcaaaaatcggggactagcctttgggatcatggaagcaggctttggcgcggggcaaatgcttctcgttcccggctcactcatgttgatccattggtttagctggaagctgacggttgtggtgttgggactgctgttaatcgtgattgtctttccggctgcgctgctgatgctgcggaacaatccttcagaaaagaatacagagccgataggcggactggctgcatcagaaaaagaaacagcacccaaaacaacagctctttcagtggccgggatgtttcgtatgaggcaattctggttcttgatttttccgtttttgatctgtggttttacgaccgtggggctgatggatacccatttgattccgttttctcatgatcatggcttttcaacgacagtcacgagtgctgctgtcagtctgctggcaggctttaatattgctggcatcttgctgtccggaattgtagcggatcggtggagcagccggaaaatcctgtgctttttatatgcggtgcgggcgctgtcgatcgtgattcttatttacagccacgagccctacttgcttttaacctttgcgattctgtttggattagtggattttgcaacggtagcaccgactcaaatgctcgccacccagtactttcaaaactactcgatcggcctcatgattggctggctgtcactcgcccatcagatcggatcggcactaggtgcgtatgtgcccggcgtcatctatacggtaacgggtgagtatacactggctttttatttgtcgattggaatgctcgtgcttgcgagcgtaatgaatgtgatgctgagggagcctgcggcggtcacgcgtgacagtgcgtctgtggtagacaagtgatgaggacaaagggaaagcatctctgatttcgagattattcagagatgctttttttgtatttttgttctaatacgaagtcgatcataccgactatgcgggcgttttcggatttttgtttgaagcgttctgaaatttgaacttttcttgaaaatgggtaaacaccaaatacccatattaggccaattaacacaaaaaacatttgtacacccatttctattaaatcattataatgagaactgaaaaaataaatatataacgttattaatgttactgtaaatacgattttgacagtgtgtttgaatgtgagctgtggttcaattaaacacaatttcatttggttaagtgtgaaagagtcttgtttcattaggtacgaaagtaaatcattatcgttttgactgatagggtacaagtcagtttctattttttttgtgatctcctgatatttatgtatattacttttcatacagtatccccccttttttaagaagaactccatgaatccctacaggactcatggagaaacaatattatttaaaaagtgctaaaaatgtacggaagagtactgcagcagctcccatttcaggacctaccgttaatactaatgcaccaataccagcaacaattaagatacctgtacctaccacaagcatgttgttgacaatagtatcccaatctggtgagtatacttcctcagtatctggtaaagtaaagtgcttctgttttattttaaacgtaatcgtagtcgttagtccagttgtgatattgtcaccgactggaatatcaggtgtatagattttaatttgaatatttaaagattcagctgttggatttacataaacctccaaataaccgttgcgtactgataagctgagactatttaaaaggttttgataagagtcgatttgtgacgcagtaagagacgtttgagtgtcgcccaataaacccgtgatataggcacctggtttaccatttgtaatggtaattgtgtttggtgaaccttcacttggtatggttgccaaaagtgaagttgatagaataatatccaattcaggtgatgtgaaaatggtttctgtcgtatcaaattcaaacatcgcgtttgccaaacttgttagattttctaaagccggaatggtagataaaatgtctgtcagtgtacgcagccttgcatcatataccggatcagacggcggatttacattgcttgcacctgagtctcttcctgaaaatccgtctttatcaattccgatgcttccagaaccgcttccgatggttccttcataaaattgatcaaaggcccagttgtttggcataggatagccgagattgccgctaaatcctgttgacatatttgccacaaaactatactttgtcagttctgcttctgatgtacggatacaaatgtttcttggtccgtaaacccctatttcatacttaggtgcggttgaaaatgtctgcatttttgtaaatgctgacttaatctcttggaaataaggaatgattttatcggtcacttcataatcgtatgcatcaaaatcgacagcgaaataaatggtcgtgcctgacggaaaacctaatcttctagcaacagaagcggcactatatgcatctcttgtgccttggtctttgacaaaataagaagattcatagccgccgtcttgataaattgggaaaaccttcaatccggcatcaagaataactgcaagctctttagatgtcagggcttttgatgtgaggccgctgcttgtccgcacatttccggtcaaatatctgccaaccgttttataaccgttattccgcagtgtttgagctttttctgcggttataattgtagcagtgtcacaagcagaagcggcgcgagttgtgtctcctgagcttgataataaagctttaatggttggcatatctgcataacctgtttgcggcaggcacatgaactcttgaaatgctttaacagctgaaacaacacccacaccatatttgccgtcaaactcaccaggatcgaacgattttccgttacaatagagggcgtactgaacaattaagacaaatcctgttcttgaatcgccgggagttaaagtaggacacaaacttgtggtgccgtttccgaaaaatccattggcaacacttgtgctcatgccttcttctttttgcagggcataaataagagctttatttgtatcgcggccatacagtccgtcacaaggcattaacccgatatagtcattgtagtcccgatttaagttttgttgaatctggcgaattcttgaatcacccccagacaccagcttaaaagcgctcatgtctaataaggctttcataattaacgtggtgacaatcccatcctgtgttgtcagtccggcagctttttgaaattcttttaccgcattttctgttttttcgtaaaagacgcctgtaaaaccgccgggattaaagcctttacaccataaagccccttgtaaaataaaattcatgttgcttggttttgaatctggagcttggcgtttaagaggcttaaataagcgctgtgttgtcggcccgaagttatcggctggctctgagatacccaattcaatttgaagcgcccgagtcagaccgtagatcgtatcccacccagttttcccgctttcttcaactgggttatacccatgtttgccgctgtacgtatcgttcagccattgctgtgtgattaagaccatttcatcaaccatttcgattcctcctttgttagattgcgttcatttataggtggcaaacgtaggacaaaataaaaaaatggatgccgttaagcatccattttacatccgttctccaacagcttcgctttcggtttcagctctgaaatgtagaggcctaaaagtgtaagcgcgcctcctagaagagcgatccatgtcatgttttcgtgcagaatcaggacagaagcggcgatcgtgataaccgggaccatgtaaatatacgcactggatttgacggctccgagcacgccaactgaataattccaagtggcgaagcacagggcagaagcgccaattcctaagaaaagcatgttgagtatatttgaagcagatgaaaatcggcttaggtcaaaatggaagtcgaacaaaaataaagcgggaaccataaataataggccatacaaaaatactctctgtgtcaactcgatgatgtggtattcgtaagcgcttaattttttcatgaatatcgagtatccgccaaacacgagagcagccccggctgccatgatgtctccgagtggatttagacgcagtactacattgccgttaaacgtaatcaataaaagcccgatcagtgccgagacaaatccaatcaaaaaagtcagacgcagtttttcgccttcgagcagaaaatgggccaaaaccgcagtgatcatcggtataatggacacgatcatgccgacattggaggcgtatgtataggtgagagctatattttctaatagaaagtataaggttacgccaaataaaccagccccggcaaacaacagctcctgccgccaatttctgaacggaatcatgttggggcggacgaggataagagcgataaagcccatcaaaaaccgataaaataatatttccattggagagaagtcagccagcagaacttttgtcgaaataaaggtcgtcccccaaatcagaatggtcacaatggctgcgatatgccccgaagtttctctttgtatgttcatctgtgaagctccttttcaaaaatcttcatgtattgcttcggcgtcagccccacctgccgtttaaaaaacttcgtcatatggctctgatcgctgaatcctgtctgaaatgccgcatcaatcggccttaccccttgttcaagaagttttttggcttgattaatccggattgtttccatgtagctattaggagtaatgcctttttgttttgtaaatgaacgcaataaatgatacttgctccagcctgttaattcactcaaatcattgagtgtaacattttcggcataatgctcttctaaaaattcacaaaccattttgacttcgtctgatggttctggaacgctgctaaggaacgtgacatctgaataatggcggatcagctcttctaatagatgaagaaacagctcctccttacgcaaagcttgtttttcctcggatatcaaaatatgcaattcctgcaggctggctgtcagctcatggcggaataacacatgctgggagaaataagggagatgcccggcgccagtaatctctttcaccgccttctccatgatatccggcatgacattgatacaccgataatcaagcgtccggccgtcaatctgttcacagctatgcgtgtcacgggggttaaagaggagaagatcacctggattgatgatatattcttgatcctggcaggccagataccgttgccctttttcaataaatccaatcacataataatcgtgaaagtggttcgggaacttttgcataattcccttgaagcggtaggcttctatatgaaggtgtgggtcaagctgcagtgtgcgggtttcgttttgcatgggatgcctcctgtcggtgtggtggtcttggattaagtgtagcatgattttgggggatttcttgtatgatgttgctgtttaggaatagagaaagcagaccgttatttgtctgctttcgtttaagaatttaaaagattttaaccctcaataataattttatcttttttaataaaaatttatttttcaaatatttcagttataatggtttggaacagataggaggggcaaagatgtatcaatcaaagaaggttttattgttaggttcaggtgaattaggtaaagaggtagtgattgaagcccagcgtcttggggtacagacggtggcagttgacagttacgagcatgctccggcgatgcaggtcgcgcataacagttatgtcgttgatatgctggacccagagcagatcagaaccatcattgagaaagaaaatccggatttgattgtgcctgaggttgaggcgattgcgacggatgaattgctgaagcttgaagaggaaggatttcacgttatcccgaatgcccgtgcggccaagctgacgatggatcgggaaggcatcagacgacttgcggcggaaacgcttggacttgcgacagctggctatgaatttgcgaatacatatgatgaatttatacaagcggcagctcagatcggttttccttgtgtcgttaaaccattgatgagttcttctggaaaaggccaaagtgtgtgccgctctgaagcggatttagagagctgctgggagacggcgatggaaggcggacgggtgaaaaacggccgcgtgatcgttgaggagtttatccctttcgaatcagaaatcacactcttaaccgtacgtgcggttaacggtacggcattttgtgagccgatcggtcatgtgcaaaaggacggggattatatcgaatcgtggcagccgcatgatatgacagagcagcaaatagaagaagcgaagcatattgcgaaaacgatcacggatgagcttggcggatacggcctgtttggtgttgagctgttccttgcgaaagatagggtatatttcagtgaggtatctcctcgtccgcatgatacgggtcttgtcacgctggtgacgcaaaatttgtcagaatttgcgctgcatgtccgggcgattctcggctttccgattacagaaatcacacagctttctcctggcgccagcaggcccctcaaagcgccggaagaattagcggattacactgttgaaggattggaaaacgcactggcagtcccaaagactcaagtgcgcgtctttggaaagccgataacaaaagccggacgtcgtatggcagttgcgctttctgctgctgattcagttgaaacggcaagagagaatgcaaagaaagcgttggaccagctaattttaaaatagagtttgaacaggtcttgtcatgggacaaggcctgtttttttctttctccgtaaaagttttatcataagaatcagaaacctgattataatgtaaaagtcttccatcgatacgggtggttgacactaaaggagggagatgacaaaatgaaattagttccaagattcagaaaacaatggttcgcttacttaacggttttgtgtttggctttggcagcagcggtatcttttggcgtaccggcaaaagcggcagagaacccgcaaacttctgtatcgaataccggtaaagaagctgatgctacgaaaaaccaaacgtcaaaagcagatcaggtttccgccccttatgagggaaccggaaaaacaagtaaatcgttatacggcggccaaacggaactggaaaaaaacattcaaaccttacagccttcgagcattatcggaactgatgaacgcaccagaatctccagcacgacatcttttccatatagagcaaccgttcaactgtcaatcaagtatcccaacacttcaagcacttatggatgtaccggatttttagtcaatccaaatacagtcgtcacggctggacattgtgtgtacagccaggatcatggatgggcttcgacgataaccgccgcgccgggccgcaatggttcgtcatatccgtacggtacttattcaggcacgatgttttactccgtcaaaggatggacggaaagcaaagacaccaactatgattacggagctattaaattaaacggttctcctggaaacacggttggctggtacggctaccggactacaaacagcagcagtcccgtgggcctttcctcgtcagtgacaggattcccgtgtgacaaaacctttggcacgatgtggtctgatacaaagccgattcgctccgctgaaacgtataagctgacctatacaaccgatacgtacggctgccaaagcggctcgcctgtttatcgaaactacagtgatacagggcagacagctattgccattcacacgaacggaggatcgtcatataacttgggaacaagggtgacgaacgatgtattcaacaatattcaatattgggcaaatcaataaatacagcaaactagccatattcatgtctattttgtttttatgcgggtgcagttcgcagacgcattcttctcaaaaagaaacgactattcctgtcactcttcatgtggaggatgctaaggggctgccggtcgaaggggttcaagtgacgattgtcaaagcgccctcttcagatgaggagccgagtacagagattggcgagatactcggtaaaacagacaaaaacggagatatcaaatgggataccggcagaaaaggcgattactcagtcgcgttgacgaagggtgaaacatcagtaacccatcacatctcgttaacagaggataaaaaagatcatgccattccattagtcttcaaagaatagcagtttccttgattttaagggaactgccttttttatttattgcaggaaaccaaactatatactggaaatttattatgtgagataataagaaataggtattttttcttacgagacaaaaggggcgttatcctttatatcaatcaaacccggaggaaaaagaagaagatgatacaagattcaatgcagtttgccgcggttgaaagtggtctgcgcttttaccaggcatatgatcaaagcctttctttgtggccgattgagtcggaagcattctatgtttctactcgttttggaaaaacacatatcattgcaagtgggccaaaggacgcaccttcgctcattttgcttcacggaggccttttcagctctgcgatgtggtatccgaatatcgcagcgtggagcagtcaatttcgtacatatgcggtcgatataataggagacaaaaataaaagtataccatcagcagccatggaaacgagagctgattttgcagaatggatgaaagatgtctttgattctcttggacttgagacggcacatctggccggcctttcgcttggcgggtcccatatcgtgaatttcttactccgcgcgcctgaaagagtagagcgggcggttgttatcagtcccgctgaagcgtttatttcatttcatccggatgtctataaatacgctgcagagcttacaggggcaagaggagctgaatcatatatcaagtggatcacaggcgacagttatgatctgcatcctttactgcaaagacaaattgtggcgggcgtggaatggcaggatgagcaaaggagcctgaagccgacagaaaacggctttccgtacgtgttcacagaccaggaattgaaatcaatacaagtcccggtacttctgatgttcggtgagcacgaggctatgtaccatcagcaaatggcctttgagcgggcttcggtattggtgccgggaattcaggctgaaatcgtaaagaacgccggacatctgttatctctggagcagccagagtacgtcaatcaacgcgtcttgtcctttttatgcgggggataaaatagtaaggaacatgaaaagattggcattcatttttcaaaaggtaacaaatgttgtataataatagaatttgaatgctgctttttttgggagcattctatgttatcatgcttattggagaaaaatttttcctgtaacgctattcgatcactatcgtcaaataatatagatggttttacaattggaggtttggttacactgtgaattacatcccctgtatgattacgataggaaacttcatttgcggattgctggcgattcattccttgctatatcacaacattcattcagcagtgctttttatttttacaggcatgttccttgatttctttgacgggatggctgctcgtaagctgaatgccgtttctgatatggggagagaactggattcgtttgccgatctggttacgtttggggtggctccttctatgcttgcttacagtgtcgcgttgtataccctgccatttatcgggatcttatgcgcattgacgtacagcatttgcggaatgcttcgcctctctaaatttaacattgaacaaagcaagctcccgacgtttatcggtatgccgattccgtttgcgggcatgtgtctcgttattttaagcttcacctataacccgatccttctggcaatcggcacttgcggactctcatatttgatggtgagtaaaataaaattccctcattttaaaaaacatgcggcagaaaacctggagtctgggagatggaattagttcagcagctcatagcggattacggttatctcgctatttttttgatgctggtattaggaattgtaggattgccgattccagatgaagtgatgatgaccgttgttggctatttcacgcataccgatgtattgaattatgagctttcgatattgattagttttgtcggggctttgttaggtatgctgatcagctacatgattggcagaaaagccggacgcccgtttattgacaagtacggcaagtgggtcggcttaaaagaaaaaagaatgatgaaagtggaaaaatggatgaagaaatacggtccatattctcttattttaggttattttattcccggcgtcagacatgtgacgtgctacttttcggggatcggcaaaatggatctgaaaacgtatgttgcgtttgctgcaatcggcgcctttttatggtgctttgtttttattacaatcggaagggttatagggattattcatgtttaatacggctgtaaagattctgtatcgatcattgatagagctgacgaatcatcgtttgtcatcctatctgattaaaggattttgcgagtcgaaaatcagcaaaccggtcattccgcttttctcaaaacattttcggctgaattgggatgatgtggacggtacggctgctgattacggatcgctgtccgaattgttcattcgacaaataaatctggagcggcgccctgtgtcaaaagaggcgcatgcggtggtcagccctgttgacggtgtggttcagacggtaggaatcatcaacccgaatcaaacctttacggtgaagggaaaagattactcattcgctgagctgaccggctgtaaaagcgcagaccatcaatacaatggcggttacttcgtcgtgctgtatctaagcccgaggcattatcaccgtttccattctccgatcagctgcaggtatcaaaagctggccgagcttggaaatcgctcatacccggtaaatcaactaggcttaaaatacgggaaagatgtgctgtcgaaaaattaccggtttgtgtacgagctgaatagcggcagccgaaatctcctgatgattcctgtcggcgcgatgaatattaattctatcgtgcagacgaatacccgtactgaattggagatcggcgaagagctgggatacttttcatttggctcaacggtcattttgatttttgaaaaagacgcgttccagccgtccgcccatttagcagaaggccaagaagttcaagtcggagaactgataggttatgaagagtaaaaagaggagcttgcataaacgcagcgcctctttttttgaagaaaggtgagacttatggagaaacaaatcatcagctggattacagattatcagaacaccggagatgaagccgtcctgcggcaagtgcgagaagtgtgctggccgatcgttgaagcggttttgcatgagaaggcaatagatgatgaacaagcgaacaatttacgcgacaaaggaatcgagcggtttccattcatcatcagcaaataccaagcggatgtgcagcttccggttgagacatttttacgaaatacgtatcggttttactttcatcaggtgatgagagaatccagctaaagcttctttcaacagagaagcttttttttgttggcaggaaaaggaaactttttctatatctatctcgtaatgactagagaacctagcagaaaaggagagatagaattgaaacgaatgatagtgagaatgatcctgctgctgctgattgtctgtctggcgttttcttctttttcagtctcggcacgtgctgcttctgaagaaaaacattgggagcgctggattgaacgacatgcacagccactggatgcttccaatgcttcaaacaaagaccttcactttctgaagaaggtgctgaaaggaaaacgaatcgttcagttaggagaaacgacacatggcgctggcgaaatcaatgccacaaaggtcagaatgatcaaatacctccacgaagagctgggatacgatgtattggcctttgagtctggcttccctgatacaaatgcatcctaccttaatatggaccaattaacccctaaaagcacgatgaaaaactccatttacgctgtatggcacacagaagatgtcgttgaattgtttgattacatgaaagagcaaaaagagaaaggcgatccgctgatccttaccggttttgatattcaaagcatgaagaattcattcaatgatgctgcgactcattgggtaaaagcggtggaccctgagaaagcagagttgctctcccaatcagaaaatgatttttcaacattagtgacagacagcaatacgtttgatgaattttcgcaaaagaaggaaaagcttgtgaaaaactatcagaagctgatcaagttcactaaaacacatgcttcagagctaaaagaaaaccttccaaaagagccgaaagcttatgagatgtttatgcattctcttcagctgagaattgacgtaatggaaacgtatatgctggaagaaatgaaagaaaaactagaggagtatccggagaatattgaggatttttcattctttatgagagaccgcatgatggctgaacaatttcagtgggtagctgacaccctttatccgaaaaagaaaatcattgtctggggccacaattaccatctacgcaaacagaatacgaagatgataaaggactgggtacagctaaatggccctaacatgggtgattatttgccggagcggctgaaaaaacaaacatatacgattggcatttatgcttactcaggtgcgagtcttgatagctccgataataagactgttaagccggttacaagcccgccgccgtctgggagccttgaagctttgctgaaagcggcggaccgaccggctgtttttgttgattttctccatacaaaaaacaagaaaggcacttcgtggatgtataccccccgcacagcactctattggggattcacagaagagcagctgatccttaaggaacaatatgacggtgtcatttggctggagcatatcacaccatctgtcattatcaagtgagcggtgtcccctgtggtaaacaggggatttttacatatcgcaaaaataatcaaaacatataatccgtgatccattattctaaaacagaaaggagattggagcgtgcaatgtattatgaaaaagctgtccagaaaacaatcaattggattgaatcacatttacatgagcaaatatcaaacgaggatattgttaacgtttcaagcttttcaaaattccattttcatcggatttttcaaaaagaagtcggcatgtcggttgcttcttatattcggttaagacgtcttgcgaatgcggcggcagctttgctttatacagatcatcgtattatcgatattgctttgtattatcagtttgaatctcaagaagcatttacgaggacgttcaaaaagatgtatcacatgccgccaggagcataccgaacatttatgaaacgctttacttcaaaaaaggaggaatcttacatggagaaaaaaatgaaaggctgggtattgagcgggagccatccgttccaattcgaaatggggattgaccgggaaaatgtacatcagggaaaagcttcagggtatttaaagtcaacgatggttcaggatatcggtgaatttgcgacgatgatgcagcaattcaaagcagatcgctatctaggaaaaaggcttcgtctatcaagttttatcaaaacaaagggggtgcagcattttgcctcactttggatgcgggttgacagtgctgctgatgatgttctccaatttgataatatgagcaacagacctattaccggaacaaccaattggaatcattatgctatcgttttagatgtcccagaaaatagcgctgtgatatcttttggcgttcaattatctgggccgggtcaggtgtggatggatcatgttgtttttgaagaggtagatgagagcgttccttcaacaaaccttgaaatgccgggagaacttttagatgaaccggtaaatttatcttttgaagaggaactacaaaaatagttttcagacaactatttttattagtgagttattggaaaatactatttgttattaataaacccttgtgctgcttaggtttgtaagagcttggatatttttatcagtctgggcggatctgttcatctttgcggcattttcctgtatgatatagtaagagtgtgcatagcaactaactataattgaacagggtgtttaaaacatggaaaaacaatacagagtattactttactataaatatgttccgattgaagatccagaggcgtttagagagcagcatttggctttttgtaaggagcttggtttgttaggccgtatccttgtttcttctgaaggaattaacggtacggtatcaggtacggttgaacagactgaaaaatatatggaaacaatgaaagctgatcctcgttttgcggacatggtatttaaaattgatgaagcagaaggccatgccttcaaaaaaatcttcgtccgccataaaaaagagcttgtaacgcttcgtcttgaagatgatgtcgatccgaacgaaacaacaggccagcatttgaagcctgcagaattttatgagaagatgcaggatccaaacacaattgtcatcgacgcgcgtaacgattacgagtatgaccttggccatttcagaggtgcggtccgtcctgacatcgaagccttccgcgaattacctgaatggatcgaagaacacaaagatatgcttgaaggcaaaaagattttaacgtactgtacaggcggcgtacgctgtgaaaagttctcaggatggctggtgaagcaaggctttgaagatgtagcacagcttgaaggcggaatcgtgacatacggaaaagatccagaggtgcaaggcaagctttgggacggccagtgctacgtatttgatgaaagaatcagcgtgcctgtcaaccgtgttgagcatgtgattgtcggtaaggactactttacaggagaaccgtgtgagcgttatgtgaactgcgcaaatccatcttgcaataaaaaaatgatatgcacaccggaaaatgagtataaatatatgcgcagctgcagccacgaatgccgcacgaacccaagaaacctgtatgtgaaagagcataatatgacagaagaagaagtaaacgcaagactggcagcgattgaaacagaagatcacgctgctgctgaataaaaaaagaacacctcgtattgaggtgttctttttttctatatgctttcagtttggctgtttgcggaaacccattctttttggcggaaggccttttcccattttgataccacgatacaggcgatcgcatgtcccggtacgttcacgcccgttctcgccatgtccatgacgcggtcaacacccgcgataatggcaacgccttcagccggcagtcctacagcattggcagtcgccagaagaactacaagcgatcctgagggtacagctgcaatgcctttactggtcatcacaagcacaagcatcatgagcagctgctgggacaatgtcatgtctacttgaaaggcctgtgcgagaaagatacaagaaactgataaatataagctggagccgtcacagttcaatgacaagccggagggaacgacaaatgataccactcgtttgggacagccgtatttctccattctatccatcagctgagggagaatggtttcagtgctggtggtggaaaatgcaattaaaaacagatcccatatcattttcaatacttcgaaatacttaatctgaaagatgagaccgacaagcggaaagaggacaaagaggatcaggaacaggccaaggaatacggtgccaaccagcttaaacatagggaggaggagttcaatgccgtattggcctacagaagctgccatcagggctaacacgccgataggagcagtgaccatgacgatttgtgtgagcttgaacataatctgagcggtagattcaaagaacttcatcactggttcagaagctttgccgataccagcggcggcgacaccaaataaaatggcgaagaaaataacggcaagcaaatcatttctggccatgacatcaataatgtttgtagggataatatccaggatcatttgcttgaaatcaacaactttgtctgtgtagccggaaagttcatggatatctttttttgccaaatgggagaggtcaagcccgacacctggttttaagacattcgctaataaaagtccaagccctaataccaacgttgtaatcacttcgaaccaaatgatcgtcttgatgccgagactgcccatttttttcatgcttccgcttcctgctgctccaatgacaatggtagaaaatacaatcggcacaacaatcattttaatcaggcggataaatccatctccgacaggcctcagtgccatcccgaaatcaggaaaaaagtggccgatcaccgcaccgacagccaaagcgattaaaatttgaaacgcgattaattttttcaaatgaatccccctttagaacgatagaatgtaggcatattcatatcattcgtgattcaaatgcaaacaccttttttcaagttattttattttgacagcgctttcattatgttggcgaaaaagtcccccgcagcagggggacttttttacttcatttgaatgtgctttagatcttcttcagaggtatttgtgaaaataaccggtgttatggctgaagcggcatgctgcttgatgtaattgagatcaaaggtgagaagcagttcgccttgtttgacggcttgtccgcttgtgacatgtgcttcaaagccttccccattcagtttgacggtatcgatgccgacatgaatcaggatttcagtgccgccggcgctcataaagccgatggcgtgttttgtcggaaaaatcgagacgatctcgccgtccgcaggtgcaacgacttttccttctgatggtataatcgcaaatccctcgcccatcattttttctgaaaagacttgatcaggcacatcccctaaagagactgtttctcctttaatcggataaaaaaaggtctcaccggaatcgggcttctgcggtttgtcagttaccgtgtccagcgtggcggcggtggcagggacgcctccggccatgattgttttgatgtcgtcttttaaggcatcggacttggttccgaatattgcctggaagttgttgttgacctccagcacgcctactgcaccaagccgttttaattcatcctttctgacttgacttggctgatgaacggtcacacgaagccttgtgatacacgcatccaggttagcgatattttgctgtccgcccaaggcctgcaacacgtgaaaggcaagttggtcttttgcaactggagctttctcctcattctgaccgtcttcatctgtctcacggccgggcgttttcaaattccatttcagaatcgcaaatcggaacaaataataataaatgaaagcaaacacgatcccgacaggaatgacaacccagccgtttgtagacagtccgtagttcaagacgtagtcaattccgccgcctgagaacgtatagccgtggcggacatggaataaatcacaaacgacaaagatgacgccggcaagaatagagttaatcaaatagagcacgggcgcaacgaacaagaaagaaaactcaaccggctctgtaattccggtcagcatagatgtgagcgccgcagaaatcatcacgccggagatcatttttttcttttccggacgcgcggtatggataatggcaagagcaactgccggcagacagaaaatcatgtaagggaaatcccccatcataaagcgcccggctgtcgggtctcccgcgaaaaaccttgtcaggtctccggttacggtgttgcctgttgatgggtctgtgtattctcccatcataaaatagaaaggcgtataaaaaatatgatgcaggccaaaaggaatcagcaaacgatagatcgttgcataaaagaacaggccgactgttgaatcggcaattaaactgctggctgcgttaattccgttttggattagcggccaaacgaatgagaaaatgacgccgatcaccaatgaactgacggaagtaataatcgggacaaagcgttttccagagaaaaatccaaggaccggatgcagctcgattgatgaaaatcgcttatataaataggcggcgagaagcccgataatgattcctccgaaaacccccatatcaatcaggtgctcggctccttcatacggaggctgaaggccgagtaattttcccatattgtcgagggtgacggttaaaattaagtatccgatgacagctgcaagtccggctacaccttctccgccggctaatccgatcgcgacccccacggcgaaaatcagcgggagattatcgaatacaacgccgcccgcatcctttataatagggatgttcagtaaatccttgtctccgaaacggagcaaaagacctgctgccggcaggacggcaaccggagtcatcaacgcgcggccaagctgctgcagaatttgaaatgcctttttaaacatgacagtctccttttattgtgttatgagaatgatgcactctttaatttttgagctgctttataatcggcgataacggttacatgattgtgtttttgaagaatagaggctggtacatctgtcgtgacaggacattcagccatcttttgaatagcgtctgctttttcctcgccgcttgctaaaagcacaatatgtttgctgaattccatgatggttttaatgcccattgaaatcgcgagtctcggaaccagcaccggatcgccgccgaagaatctggcatttgcctgtatcgtgctttccgagagcttcacaacacgtgtccggtcttcaaaatcagatcccggttcattaaaaccgatatggccattggcgccgatgccgagaatttggacatcaatgcctcccgcctggcggatgagatcctcgtatactttgcattccgcctcaagctgcgggttgtctccttgcgggatatgaatatgatcaggctgcatattgatatgctgaaatagatgctcatgcataaagtggttataactttgcggatgagatggagagagaccagcgtattcatccaaattaaatgtagtaacctttgaaaaatcaatttcgcctgcctgatagtctgaaatcaactgcttatacaagccgaccggtgtgcttcctgttgccaggccgagaacggtatctttcttagcttgtatttgttctttaataatggcagcgcttaacttacagagttcttcgtagtgctcggcgattagaatcttcatgtgacaccccctcaaagagatagacaagcaccatatttgttatgaccaatttatgatacttgtcattacgaatttagcaccgcccttatcaaactgtcaatattaatttctgaaaatttgttataaaagaaggatacaaatctttcatattgggatggcaaatggtattatggtctcaatgaaaaagaacggattgcatacagaatggggagaatgaaatgacagctttatattctgtgatcaagtttaaaatcattgagttgattaaatcgggcaaatatcaggcgaatgatcagctgccgacggagagtgagttttgcgaacaatatgatgtcagcagaacaactgtgagactggcccttcagcagctggagcttgagggatatattaaaagaattcaaggaaaagggacatttgtatcggcggcaaaaatacaaacgccgattccgcataagattacgagctttgcagaacaaatgagaggccttcgttctgaatcaaaagtgcttgagcttgtggtgattcctgccgatcactccattgccgagcttttgaaaatgaaagagaatgaacctgtcaacaagcttgtcagagtcagatacgccgagggggaacctttgcagtatcatacctcatatattccctggaaggcggcaccggggctggcgcaggaggaatgcaccggctcgctgtttgagttgttaaggacaaaatacaatattgaaatcagcaggggcacggaatcgatcgaaccgattttaaccgatgaaacgatcagcggccacttattaaccaatgtcggagcgcctgcgtttttatcagaatcccttacctatgataaaaatgaagaagtggtggaatatgcgcaaattattacccggggagaccgaacgaaattcaccgtagaacagtcatatcattcataaagcaatgtgttttaagaagggaatggtggttctatgtttttatttacgaatggaaaagtgctgtggggagcagtgattgctgcattcatcctttcaattgtattttacccttttctgccgacgcagatgccgattcattatgatgttgcgaacagtccggatctgacggttaacaagctggcggggactgtgatgctgcctgttttgatggtggtgtttgcatgggcgcggaagatcaattggcaatttgtattcgcagtgtatattttgctgatttgccacattgtcgtcctttgtttagcgctctaaatcaaacagccagaataaaactggctgttttctttaatttcagcttcatctgacaatgaatgtggtgtataatagctgatgatcctaaagaatattctgaaatttatcggtgtggagcggcgtatcatgaaaggaagggctgtatgttttttgcagctttaaaaagactgaatatttaaacaattatatgaaaggtgtgctgatcagattgaataagcttattgaacgagaaaaaactgtatattataaggaaaagcccgacccgtcttccttggggtttggacaatattttacagattatatgtttgtgatggactacgaagagggaattggatggcatcatccaagaattgcaccgtacgcaccgcttacgctcgatccgtcttcatctgtttttcattacggccaggctgtttttgaaggattaaaagcatacagaacagaggatggcagggtgctcctgttccgtccggatcaaaatatcaaacggctgaacagatcgtgtgagcgcatgagcatgccccctttagacgaagagctggtgcttgaggcattgacacaattagttgagctggagaaagattgggttccaaagaaaaaaggaacgtcactgtatattcgtccttttgtcattgccacagaaccgagtctcggtgtgaaggcatccaggagctatacatttatgatcgtgctttcgcctgtcggctcctattatggcgacgatcagctgaagccggttagaatctatgtcgaagatgagtatgtgcgggcggtcaacggtggagtcgggtttgcaaaaacggctggaaactatgcagccagtcttcaggcacagcggaaagcgaatgagctgggctatgaccaggtgttgtggctggacgccattgaaaagaaatatgtggaagaagtagggagcatgaacatctttttcgtcataaacggggaagctgtcacacctgctttaagcggaagcattttaagcggggtgacacgtgcgtctgcgattgaactgattcgaagctggggcattccggttcgtgaagagagaatatcgattgatgaggtgtatgcggcctctgcacgcggagaattgacagaggtcttcggcacaggcacggcagcagtcgttacgcctgtcggtgaactcaacattcatggaaaaacggtgattgtaggcgacgggcaaatcggggacctctcgaaaaagctgtatgaaacgataacagatattcagcttggcaaggtgaagggcccgtttaactggacagtggaagtgtgaaaatcgaaaaagaacctgcctgaaggcaggttctttttattttgaataagtcatatcagcagccggctcgcttttgcggttttttacataatatattgcatagcaaatggccataaatggaacgccgcaatagagtgcgattctttgattcggatcaaaggcaatgccaacaacggaagccaggcataacaggaacgcagcaatcggcacgaacggatacaaaggggttctgtatttcaaatcagtaaccttgtttcccgcttcgatataacgttttctgaacatgaattgagaagcagcgattcccatccacacgacaacgacggcaaaaccggaaatcgacacgagcacaacgtatacagtgtctggcgcaaatacgctggacagcaacgacagaatgccgccgatcatgctgaacaccagcgcgttaaaaggggttccttttgacgtcagctttgcaaatgtcggatgaagcgttttttcttttgataaagaccacagcatccgggaagaagcgtagagtccggaattagccgctgacaggatcgctgtcaggataacaaagttcatgatatcggctgcgtatggtacaccaactctgtcaaaaacagcgacaaacgggcttttgatgacacctgcatcttgaatcggaatcagccctgacagcacaaaaattgttccgacaaagaagagtgagagacgccagaccgttgttttaatcgcttttggtatcgtcttgtcagggtcaacgctttcaccggctgcgattccgattagttccgttcccgaaaaggcaaaattgacggacagcatcgtcatcaaaatcgggacaaatccatttggaaaaagcccgccttccgcggtgaagttggacagcatcggagcggcttctccgcctttgatcggaatgatgccgaacatggcagagccgcctaaaagaataaataatacaatggctaatactttgatgctggaaaaccaaaattctgattcagcgaaaaacttgaccgaaaatgcgttaagcaagaaaatgaacagcgcaaagacggcactccacatccaaaccgatgtatgggggaaccagcgctgcattaacaggccggctgctgtgaattctgatcccaatgccacggtccatgttagccagtacagccaagcaaccgtaaatccggtgcccggccctatgtatttggctgcataggtgtgaaaggcgccggtcacaggcatggcgactgacagctcaccgaggcatagcatgaccagatagacgatgccggccccgactaagtaggcgagtatcgttccggccgggcctgcttgctgaatggtataacctgagcttaaaaacagcccggttccgatgacacctcccaaggaaagcataaagaggtgccggcttttcatacttctctgaaagtttgtctcattcttgttgtgggcagagttcatctttttccaactttctataagcgatttatttcctcctaataaaaaatctcatgtcaggaagtgacacgagactccggcgaaccggctttaagttagaatatacaaactattccgataagtcaagttgtttttaaagagcgggcccaagccgcaatttcttgaatatcttcgggttttgtccggcagcagccgccaatcagtctcgcccctttttcatgccaggtgcgggcgctcgccccgtaagattctgcgtatgctgcgccgttccacgtttttgtttccggatcatattgctcacctgaattcgggtagacaatgatcggttttgacgtgttcttttttaactcctctatcaaggaagggatatgctgaagcggcgtgcagttgatgccgagtgctgcaatttggcggtgttcatcaagccacgatgcgcagtcagctgcaggtgctccgtcactgatatgcaagccgtctttagcactgaagctgatccacgcatacgtttcaggaaattccttcaacagctgaacaatcgctttggcttcagtcagacacggaatcgtttcgcatgccaaaacatcagctccggcttcaatcagcgccttcatccggggacgatgaaattcaatcagttcatcttctggtattgcgtagttgccgcgatattcagacccgtctgcaagataagcgccataagggcctacagaagccgcaatgatcggctttggccgattcaaacggttctcttcaagcgaccaaaattcatcgcgtgcttcagctgcgatgctgacggacaactcgatgagccggcgtgcttccgcttcgctcagcccgcgtgcggcaaagccttcaaatgtagactgatagctggcggtgattgcacaatcggcgcctgctgcgaaataatcagtatgaacttgtttaatcagctccggctcttccatcaggatttttgccgaccacagactgtcgttcaaatcacagcccttgcgttcaagctcggtcgccatggcgccgtctagcacaataagcgggtatgtatctagtatgtgttggataggattcatagaatgtacctttctttcagatttttttgaaaaagatatgaaaatcgtaatggaggcttacgtgtttgtcaataaacgcaaaaagagaaaggtgttcagcccatatgtctgaacacccttttcttatgatatttgtttgttgtgcgtgtcagtctttgtgtctgaaaccggccagcactcaatgccattatggtttttgagcacatctttataaaagacaggatctttgcctgcttttttctggcgtgtatagtctttcagcgccgtaaaaacaacctttgatagtaagaaaatagcgattaaattcacgacgaccatcaaacccatgaacaaatcagcaagatcccagacgagctggactttggcaacacagccaaacacgatcattgccagcacgccgatacggtagacaaaaatcagttttttgcttttgttcaaaaagccgatattggtttcgccataataatagtttccaattagagcacagaatccgaataacaaaatcagaatggccagaaagcctgatgcccatgatccgacatgggagctgagggaggcttgtgtcaaggcgattccgctcagacccggagtatgataggcatccgaaaacaggatgataaaggcggtgcttgtacaaatgaccagtgtatctgtcagtacaccaaaagcttggatcagcccctgtttgacgggatggcttgttgtggcggtggcagcggcattcggtgcgcttcccattcccgcttcgtttgaaaagattccccgtctgacgccttgcatgagtgccgcgcccaaagccccgccggcggcctgatcaaaaccaaacgcatttttcacgattagcgcaagcacacttggcagctgcgtaatgttggtgaaaatgacgaaaaacgcaactccgatatacaggacagccaatacgacgacaatggattcagccagctttgcaatgcgcttgactccgccaaaaataatcgtgccgaatacagcaattaaaatgagtcccaatgtcaggcggtttgtgccaaacgcgttttcaaaggcaaggctgactgtattggattgaaccgagttgaagacgataccgaacgataaggtgattaacacagcgaacagcgcgcccatccaccttttgttcagccctttttccatgtaatacgccggcccgccgcggaagccgtttacatcttttactttataaatctgagccagtgtgctttccacaaagctggatgctgatccgataatggcgataatccacatccagaagattgcaccgggcccgccgagtgcaatggcgatggcaatgcccgtaatatttcccgttccgacacgggccgccatgctgatgcaaaaggcttgaaacggagaaatgctgttttttgaccgggaagcagcaccttctcttaataccctgaccatttctttcagcatgcgaacctgtaaaaacttaagcctgaacgtaaaatagattcccagagaaaggagcaaaacaattaatagctttgaccacaaaagatcatttgcaataccgacgatatgttccaggatttgctgcatacaatcacctcttttttcatatttaaaaaatgctgagctcccattcctgcgccatatgcttcagcagcataccgccagtgaggctgttgccgtattcatcaatggcaggcccgtaaatgccgatgccgcatccggattgaaaaggctgttctcttctggcgcttggaggcaccagcgccatgatgccgccggagacgccgcttttggccggcacgccgacaaacgccgcatatttgcctgaagcgttgtacatgccgcacgtcagcattaatgccttggctaattttgccacatcttttggaatcacctgctcgcgtcgaatcggatgatacccgtcatgagcaaggatcaggccgatcaacgcaatatcttctgtggtgctctccatagcgcattgcttcaagtacacctcaagtgtttcttctacgtcagcttctaaaaagtttgtttcttttaaatagtaggccagcgctctgttgcggtgggcggtttcccattcagaacggaatacttcctcatgaattctcggccgttttcctatcaaagtttccatcaccgagtaaagaaactcgagcttttcgtatgccgattctccgggaaggatcgaagcgatggtgagggcacccgcgttgatcatgggattgaagggctttcccggcttgttgatttcgagccgaatgattgaattaaaggcgtcgcctgtcggctcgacatctacgcggtccagcacatagggaatgccgcggctcatgcaggcggcaataaagctaatcacttttgaaatgctttgcagggtaaaagagacgttccagtcgccggcgtgtatcatcgttccatcaggctccaatacacagatgccgagctgtgaatcattgacttttcctaaagcggggatatagtttgcgctttgtccattggcggcaaaagggcgatagtattcaacccaatcatgaagctgtaacgccggatttatgtctttctggtgctcttttatcaattctttcatcgaattcctcctcactgatttttttcttaaaggactgaggtgtatcaaaacgaaggctaaaggggcgttaaacgctttcataatagcggaaggtataattactgtataatggagactacagaatcatacaaaatacgacaaaaacattttgaaaataagcagtaagatttataaaaacctcatgttctgggtcaaaagcaatttgcaggttttctcccgattccccaaaataaaaagcgaggatgtgatcaacataaaactggaacggtttattgaaaaagacggatatatactggccctcatgctaattacggtgccgctggccggtgaactgaaattttatcccctcaatgaagaattccgggtcagctttggggcaccggtttttttcttctttttatcgttgttgcggcatgtgcccgctgtgctgccgggttttctgactggagcggctgttttcatctttcgcgtctttctggaattatggggcggaggacacaatgggctgactccgattctgtatgatcaagcgtctggctttttcttttatatgacttacgcctgtctgttttccatattaaaggccaatcgtttccgtgaacggccgattatgctcggtttcattgggtttatgattgaagttgtgtcagattgtgtcgagctggctgtgcaatttctcatttttcatacggttgttacgcctgagaaaatcactgacattgcggtgattgcgatttctcacacatttattgtgatgagcttttatagtgtgctgaagctgtatgaaacacaatcgagagaaaaacagacaaggcagcagcacgagcacatgctgatgatcgtttccaatttatatgaagaaacggtgcacctaaaaaagacattgaaaacgacagagaaagtgacaaacgattcgtatcagctctatcgggaaatgaagggcaaggatgttcagctgagcggcagaatcctgagactggccggagagattcatgaagtgaaaaaggacaaccagcggatattcgcagggctttcaaaactgatttcgaatgagagtttgagagattatatgagggcttctgatttgctgcagctcgtgattcgaatgaatgaaaagtacgctgaagcactagggaagcagattgatttttactgctcgatcgagggagagcatgacgaatatcacgtatttatcgtgctttcgatcattaataatctaacagcaaatgcggtagaggctatggatgaagagggaatggtcagcctgaggctccgtaagccaaatgagagtatggtagaattccaggtggaagacaatggccccgggatttccgagaaaatcggagacattgtgtttgacccgggctttacttcaaaatatgacgaatttggcacgccttctacgggtatcggactttcctacgtaaaggaaatcgtgactgagctagaaggggatatcacgtttgataatcagcagcggggagtggtgtttgccatcaggctgcctgtccggcatttgattcagaaagggtgaaccgaaagctatgcgtttttttattgcagatgatgaccgtgcagtgcggtcaattttaaggcagatcattgaggacgaagatctcggggaagctgttggtgaagctgacgacggaagccaagtggaagggcatatgctgcaatttaagcagattgatattttattaatcgatctgttaatgcccggaagagacggcattgagacgattcgtcagatccagaatacgtactccggcaaaatcataatgatctctcaagtggaggcgaaggaaatggtcggggaagcgtactcgctcggcatcgaatattttatccataagccgattaaccgcattgaaattgtcacggttctccaaaaggtgaaggagcggattgagcttgaacactcgattggagccattcagcattctctaagccggcttgtcaatcggactgaacggaaagcgcgtccccagcagaagagtgacagcggtttaaaagaggcaggaacattcctgttgtccgagctgggcatgatgggagaaggcggcgcacatgatctcatggcggtcctgcagtatttagcagaacacgagcaatccgagccgcacgaaaaacaaagcccttcgctaaaacaaatattcacccaagtagcgctacggaagctgggcacaggggcctcacagacggaagtcaatcgcgaaatgaaagcctcggagcagcgtatccgcagagcgattattcattcgctgcaccattttgcttcactgggcacaactgatttttcgaatccaaaatttgaaacctatgcatccaaattctttgattttccggttgtcagccagaaaatgaaagaactccaatccaaggatgcaaaaccccttgcacctgctagaataaatatgaaaaaattcatccacgtgttttttttggaagcaaagcttttgcatgagacgatgaaacaaagaaggatataaaccaaacagccggctgaccaggctgtttttttgctgcgcagaatcccggccggacagtgattcaccgcttttttataaaatatcagaaaataaagatattgacttattgtttatttgtcttacaattaaacaaaaggatatatggggaaggagcggatgtgaaagaaaaattaataaaagcgcttacagatagaggctgtatacacaaataacaggaggttatgttgatgagccgtatcagaaaagcacccgctggaattttaggttttccggttgctccttttaacacacaaggaaaactggaggaagaagctctttttcaaaacattgagtttttgctgaatgagggcttggaagcgatatttatcgcttgcgggtctggtgaattccaatctctcagccagaaggaatatgagcaaatggtggaagtcgcagtctcggcagccggaggaaaggtgccggtctacacgggggtgggcggcaacctcagcacagcgcttgattgggcgcagctgtcggagaaaaaaggcgccgacggctacttgattctgcctccgtatttggtgcatggcgaacaggaggggctgtaccagtatgcgaaaacgattattgaaagcactgacttgaacgcaattctttatcagcgcgataacgccgttctctctgttgaacagatcaaacgtctgaccgaatgtgaacagcttgtcggtgtcaaagacggggtaggaaatatggatttgaatatcaacctcgtctatacgatcggcgaccgcttaggatggctcaacggaatgccgatggctgaagtgacgatgccggcttatctgccgatcgggttccactcttactcttcagcgatttcaaattatatcccgcatatttcgcgaatgttctatgatgcattgaaaaacggaaatgacgagcttgtgaaggaactctatcggcatgtgattctgccgatcaacgacattcgcaaacaacgaaaaggctacgccgtatccttgattaaagccggtatggaaatcatgggtttgaatgtaaggaatacagccagaccgcctgtcggcccggttgaaaaagatcattatcagcaattggaagcaattttgaagcaggcggctgaccgttttccgaaaaaagccgcgacggtttgaccagaaaaaacacgaaaggggcaatgggcatgtctgtgatcacggaacaaaacacgtatctcaactttattaacggagagtgggttaagtctcaatcaggcgatatggtcaaggtcgaaaaccctgccgatgtgaatgacattgtcggatatgtacagaattcaacggctgaagatgtggaacgtgccgtcgccgccgccaatgaagccaaaacggcttggagaaagctgacgggtgccgaacgcggccaatacttatacaaaacagcggatatcatggagcagcgcttggaggaaatcgccgcctgtgcaacgcgtgaaatgggtaaaacattgccggaagcgaagggagaaacagcccgtgggattgccattctgcgctattacgccggagagggcatgcgaaaaacgggtgacgtcattccgtctactgacaaagccgcgctcatgtttaccacccgtgttccgctcggtgtggtcggcgtgatttctccgtggaacttcccagtggcgattccgatttggaaaatggcgccggcattggtatacggcaataccgttgtcatcaaaccggcgacagaaacagctgtgacatgcgcgaagatcattgcctgctttgaggaagcggggctcccggcaggggtcatcaatttggtgacaggcccgggttctgttgtcggtcaggggcttgctgagcatgacggtgtaaacgccgttacgtttaccggttcaaatcaagtcggaaaaatcatcgggcaagccgctttagcgaggggagccaagtaccagcttgagatgggcggcaaaaaccctgtcatcgtagctgatgacgctgaccttgaagctgcggccgaagctgtcataacgggggccttccgttcaaccggccagaaatgcaccgcgacaagccgtgtcattgtacaaagcggaatttatgagcgctttaaagaaaaactgctccagcgcacaaaagatattacaatcggagacagcttaaaagaggatgtctggatgggaccgattgccagcaagaatcagcttgataactgcctgtcatacattgagaaaggcaaacaggagggggcttcccttttaataggaggagaaaagctggagaacggaaagtatcaaaacggctattatgttcagcctgccatctttgacaatgtgacatctgagatgacaattgcccaggaggaaattttcggtccggtgatcgccttgatcaaggtggactcgatggaagaggcgctgaacatcgccaatgatgtgaagttcggattaagtgcatccatcttcacggaaaacatcggccgaatgctttctttcattgatgaaatcgatgccgggctggttcggatcaatgcagaaagcgcaggtgttgagctgcaggcgccttttggcggcatgaagcagtcgagctcccactcccgagaacagggtgaggcagcgaaggactttttcacagcgatcaaaaccgtttttgtgaagccgtaatggtgctggaaagaggcatgcgtctctttcccagctttatcacagccagcatatgattctctactttgaaaaggagaagatactatgaaaaaagactttgcgaatgttacaccggcgggcaaaaaaacgtccgtgcgctggttcatcgtgtttatgctgtttcttgtgacctctattaactacgcggatcgagcgacgctttccatcaccggagattccgtccagcatgatttgggattggactcggtcgccatgggatatgtcttttctgcctttggctgggcctatgtcatcggacagcttccgggcggctggctgctggaccgttttggttcaaagactatcattgcgttaagcatctttttctggtcgttttttacgctgctgcaaggggcgattggctttttctccgccggcacagcgattatcctgctgtttgcactgcgttttctggttggtttatcagaagcgccttcatttcccggaaacggcagagttgttgcctcatggtttccaagctccgagcgcgggacagcttcagccttttttaattcagcacaatacttcgcaatcgtcattttttctcctttaatgggctggcttacccactctttcggctggcattccgttttcgttgtcatgggtattgcaggcattcttctggctgtcatctggctaaaaacggtgtatgaaccgaaaaaacatccgaaggttaatgaagctgagcttgcgtacatcgaacagggcggcgggctgatttccatggatgacagtaaaagcaaacaagaaacagaatcgaaatggccgtatatcaaacagctgttaacgaaccgcatgctgattggcgtgtacatcgcgcaatactgtattacgactctcacctatttctttctcacatggtttccggtatatttggttcaggcccgcggcatgtctattcttgaagctgggtttgtcgcttccctgccggcgctgtgcggatttgccggcggcgtccttgggggcattgtgtcagacatcttactcaaaaaaggccgttcactgacctttgcaagaaaagtgccaatcattgccggcatgctgctgtcttgcagtatgattgtctgtaactacacagattcagcatggctcgtcgttgtcattatgtcgctcgcgtttttcggaaaaggcttcggcgcattgggttgggctgtcgtgtcggacacgtctccgaaagaatgtgcaggattaagcggcggtttgttcaacactttcggcaatattgcctcgattacaacaccgattattatcggatacattgttaatgccactggatcttttaatggcgcgcttgtgtttgtcggcgctaacgcgattgcggcgatcctcagctatttgctgctggtcgggccgatcaaacgggtcgtgttaaagaaacaagaacaagaccccgatcaatcgttgcctgtctaatatttatgaaagcgctttataaagggaggaaaatgcatgagttcaccgatacaagagcaggttcaaaaagagaaaagatcgaatattccctcaattactgaaatgaaggtgattcctgttgcgggacatgacagcatgctgctgaatctaagcggagcacacagcccgttttttacccggaatatcgtaatcttaacggacagcagcggaaatcagggagtcggcgaggtgcctggcggagagcatattcggcgcacactggagctgtcagagccgcttgttgtcggaaaatctatcggtgcgtaccaagcgatattgcaaacggtcagaaagcagtttggcgatcaggacaggggagggcgaggaaaccagacgtttgatttgcgcaccactgtgcacgccgtcaccgcactggaagcggctttgttagatttgcttggaaagtttcttcaggaaccggtcgcggctttactgggcgaagggaagcagcgtgatgaagtaaaaatgctcggttacctcttttacatcggcgaccgaaagcggacgaccttgccgtatcaaagcgatgagcagtcagattgtgcgtggttccgtctgcgccatgaggaagcgctgacgccggaggccattgtgcgtcttgccgaatccgcacaagagcgctatggctttcaggatttcaagttgaaaggcggggtgctgcggggagaagaggaaatcgaagctgttaccgcattatcgaaacgttttccagaggcaaggatcactcttgatccgaacggggcatggtcattagaggaagctattgcattatgcaaaggaaagcaagatgtgctcgcgtatgcggaagatccgtgcggggatgagaatggctactccgctcgtgaagtaatggctgaattccgccgcgcgacagggcttccgactgcgacaaatatgattgcgactgactggcgggaaatgggtcacgcgattcagctccatgcggtcgatataccgctggctgatccgcatttttggacgatgcaagggtcggtgcgggttgcgcaaatgtgcaatgattggggtttgacatggggctcgcactccaacaaccactttgatatttcccttgcgatgtttacccatgtggcagcagcggctccggggcggatcacggcgattgatacccattggatctggcaggacgggcagcaattaacgaaacagccttttgagatttcttctggctgtgtcaaggtgccggataagcctggactaggcgtcgatattgatatggaacaagtggaaaaagcgcatgagatctaccggaaaatgaatttaggcgcacggaatgacgcgatcccaatgcagttcctgatccgcaactgggaatttgaccggaagcgcccgtgtcttgtgcgataagtttgtttgtaaatattgtcatatccgctattttgtcttacaattgaacaactgaagggagagttgttcgtgtacgaaggtttagaggatttgaaagtcgatacagtcaatcggaaaacattagccaagcaggtcatcgaacggattgtccatttattatcgagcggacagttgagggctggagacaaattgccgacagaaatggaactgatggacattttgcatgtcagcaggccggtgctacgggaagcactcagttcacttgaaacgctgggcgtcattacgagaaaaacacgagggggcacatatttcaacgataaaatcggcatgcagccattttccgtcatgcttgctttggccactgataatcttccggctatcattgaagcgcggatggcgctagaactcggactcgtgacaattgccgcggaaaaaatcaatgaggaagagcttcagcgtttgcagaagacgatcgacgatattgccaacagcactgacaatcattatggtgaagcggataaagagttccatcgaattattgcgttaagcgccaataaccccgtcgttgaagggatgattcagtccctgctgattacccatgcgaaaattgacagccaaattccgtacagggagagagatgtaacggtcgaatatcacaaaaaaatctacgacgcccttgccaaaagagatccgtacaaagcacattaccacatgtatgaacatctgaaatttgtccgtgacaaaattctaaaaggaatggatgaaaaataatggtgagcaaccgcagttgaaacgtaagagctgcggtttttttaaaaccaatttagaaaacgcttactaagttatgaggagtgattttcatatggcgatgaacctcaggaagaaccaagcgcccctttacatcaaagtgcatgaaatagataacaccgcgattattgtaaatgatggaggactgccaaagggcactgttttctcatgcggactcgtacttgaagaggatgttcctcaaggccataaggtggccctcaccgatctcaatcaaggggacgagatcgtgcgttacggagaggtgatcggatttgctgatgagacgatcaaacgcgggagctggatacgggaagacctcgtgagaatgcccgctcctccggcgttagacgatcttcctctcgcaaacagggtgccgcagccgcggccccttcttgaaggctacacgtttgaaggataccgaaatgcggatggcagtgcggggacaaaaaatatcctcggtatcacgacaagtgttcaatgtgttgttggcgttttggattatgcagtcaaacgaataaaagaagagctgctgccgaaatacccaaatgtcgatgacgttgtgccgctgcatcatcaatacggatgcggcgtggcgatcaatgcgcccgacgctgtcattccgatccgcacgattcaaaatcttgcgaagcatccgaacttcggcggagaagtaatggtcatcggattgggatgtgaaaagctcctcccggaaagaattgcctccgaaaatgatgatgacattctatcgcttcaggatcaccgaggttttgcggcgatgatccaatccattttggaaatggcggaggaacggttaatcaggctgaacagcagaacccgggtgtcatgccctgtttcggatctggttatcggcctgcaatgcggcggcagtgatgcgttttccggcgtgacggcgaaccctgccgtggggtatgcggctgatttattggttcgcgcaggtgcaacggttttgttttctgaagtgacagaggtgcgggatgccattcatttattaacgccgcgggctgtcagtgaagaggtcggacaatcactgatcaaagagatgaagtggtatgacagctatcttcggcggggagacgcagaccgaagcgcaaacccgtcaccaggcaataaaaaaggcggattatccaatgtggtggaaaaagcgttaggctcggtagcgaaatcaggcacaagccccatctccggcgtgctcggccctggtgaaagagcagagcaaaaaggcctgctgttcgcggcgacaccggcaagcgattttgtgtgcggcaccctgcagctggctgcgggcatgaatctgcaggtgtttacgacaggaaggggaacaccatacggcctggctgctgcgccggtgctgaaagtatcgacgcggcattccttatcagaacattgggctgatttaatcgatatcaatgccggccaaatcgcgacaggagaggccagtatcgaagacgtaggctgggaaatcttcagaacgattttggatgtggcaagcggccgaaaacaaacgtgggcagaccgttggggccttcataatgatttgtgcttgtttaatcctgctccagtgacttgattcatttttttatagcgattagatggaatatgatgtaaaatacaattaacgtataggaaacggaggggttacagcatggcattcattagattccgagtgacacgaattcaatagtgagcaactctcgcctgaatgcgggagaatcgggatgaatccgcctatgtatgagcccttatatggttattaaaaaagagggtggcgatgcctgccttcttttttctgcctccaaacatcccctctctctccttcagggcggagcatgagaaaggggaaatgggatgacaaaccttaccgaaaaacagatgatcacggagattgtcgggcttgcacgcagccaaggtttgacggttcattctgaggacgcgcaattgaatgaaaccggaatggactttcaagttgtatttgccaaggacgacacaggtatgccatgggtgctgcgaaaaccgcggcgaagtgatgttgtggaaagagcatctgcagaaggcataacgcttgcctttctccgcgcgaatctgactgctgatgtgccggattggagaattcacacgccggaattgatcgcttacccaatgttaaaaggaacgccggcggccgggattgatttggaacaaaagcaatatgtttggaatatgaatcatcagccgccatcagacgattttgtccgtacacttgctggcatactggctgaattacatggcacggatcaaatatctgctgggcaatccggaatagaagtgataaggccagaagatttcaggcaaatgacagcagactctatggttgatgtgaagaataagcttggcgtatctacgacgctttgggaaagatggcaaaagtggatagatgatgatgcatactggccgggtttctcttctttgatacacggcgatctccacccgccgcatatccttatcgatcaaaatggacgtgtcacaggacttctggattggacagaagcgaaggttgctgacccagccaaggattttgttctttatcaaaccattttcggagaaaaagaaactgcccgtttgcttgaatactatgatcaagcaggcggccgaatatgggcaaaaatgcaggaacacatttcagagatgcaggcggcgtatccggtggaaatcgccaagctagctctgcaaacacagcaggaggaacacatcaatatggcgctggaagcacttggtgtaacatcggattaagaattgacttcgtttcatgaaccgagtattataaactctacaaataatagaacggattaacaatcgtgaggaagagcaagtacgcatcagaatggaggttcagagagtcggtggcaggtgtgaaccgatcctcccctgatgccgaatgggcttctgaattgctttgctgaacggatagtaggcgatgccgggtttctctccccgttaccaagagaggagtatcgaaacataggttttctgtacttagagtgaacggctgtatagctgttaataaaggtggtaccgcgagaccctcgtcctttgcataggacgggggttttttgtgtttcttaaaggaggtgacggccaatggacgatggctggtggtggcatagcagatgagttagaaaggaggatatcaaatggtcattgcaactgatgatcttgaggtcgcatgtcctaaatgtgaaagagcgggagaaatcgaaggaacaccttgcccggcctgcagcggaaaaggtgttattctgactgctcaaggatatacgcttctggattttatccaaaagcatttgaataagtaaaggagaaaagctgagctgagatgagagcagaagagcagagtaagattcgtgaggccgcagcaggtacgatttttttgctgatcggaacagtttgttttgcgtctaaatcgatttggataaaatgggcataccaaatgggtgctgagccagatgccgtgctgctatataggcagctgctggctgttccgctgttttggctgatttttttaatatatcgtcctccaatgccagacggtaagaaaaaaggagacctatggaaggcttgtggcgcgggagtgttttgtttttttctgtctcccttgcttgattttatcgggctgaaccatgtatccgcaatggttgaacgtatattgctgatgagctatccgttgtttgtgtttggattcaccgcgtgtcgtgaccggaaaatgtcctcaattcaggaccttttcgcagttctggcggtcatgtttgggcttttcttggcgctgggcggctggaatgctgagcttttccaggcgaatatgattggagctgtattcattttgttatcttcggccgtctatgctggttatcttgtcctttccgggcatctcgtccatcaaatcggggggatccgtctcaatgcatacgggatgacagctgctggagctgccatgatgctttacacagggatcaaatcggcggctggcatgaatacgccaatggcagcatatccgctttctatgtatggtttgttcgcggtaattgcagtcgttaccacagtgattccatttgtgctaatgcttgagggcataaaacgaatcggggcacagcgagccgccgccatttcaatggcagggcctatcctgacgattttctatggagctttatttctcggtgaacggctcgggctcattcaagtcattggatgcggtgccgtattttttgtcattacggtgatggaatacaggaagctgaaaacaggaaaataagaataatttatataaaacacacacgtttttcaattacaataagtgtaattacgtgtgtgttttttgattttgtaaaggttaggtgagaagatgcagcgcatattgcttgtagaagacgaccactcaatcagtgaaatggtggatcattatttaacaaaagaaggctttggaattgtgcatgctttcgacggagaagagggcatccggctgtttcagcagggttcatacgatttggtcctccttgatatcatgctcccgaagctgaacggcatggattttctgaaaatcatccgggaaaaaagcaatataccggtcttaatgatttcggcaaaagacggagatgtggacaaggcattgggactgggttttggggcggatgatatcgccaaaccgttttcgatgattgagctgacagccagagtaaaagccgcgatacggcgggcgacgcaatattcggcagaggagccggctgtgaataaggtgatccggattcaccagcttgcgatagatatagacaatgtttccgttttgaaaaacggagagccgctccagctgacgtcaacagaatggcagctgctgtgcttatttgcatcaaatcctaaaaaagtgtttacgaaagaacaaatctaccgttccgtttggaatgaagagtactttgatgatcagaacatcattaacgtacatatgcggcggctcagagaaaagattgaggatgacccctcctcccctcaatatattaaaacgctatggggcatcggttataaattaggagagttttagaatgacagtgctatgggtggccgctgtcatcgctctggcgtgtctgaatgtgattcaattcataatgaaaaagaagcgggacgggaatctggcttacacggctgaccagcttagctacatgctcagccgggattcggcaggacaaattttgcttcctacagacgatcatgcgctcaaaggcttgcttgttaacatcaatcttatcgttgagaatcgtcagcagatcagcgctcgatttgccaaaacagagcaatccatgaagcggatgctgaccaatatgtcgcacgacctgaaaacgccgttaacggtcattctcggttatatcgaagccattcaaagtgacccgaacatgccggacgaagagcgggaaagattgctggggaagctccgccagaaaacaaatgaactcattcagatgatcaactccttttttgatttagcgaaattagaatctgaagataaagagatcccgattaccaaagtacatatgaacgacatatgcaaacgaaatatcctgcactattatgacgctgttcagtcaaaaggctttcaagcagccatcgatataccggatacgccggtgtatgcgcaggcgaatgaagaggcactggacagaatcctacaaaacctattatccaatgcgattcaatatggcgcggttggcaagttaatcggcatgacgctgtcttatgatgagaggaacatcgccatcaccgtatgggatcgcggaaaagggattagtgaaaccgatcagcagcgggtgtttgagaggctgtacacacttgaagaatccagaaataaagcatttcaaggaagcggcctgggtttaaccatcacaaaacggcttacagaaaaaatgggaggcaccatatccgtccaaagcaagccgtacgaacggactgcatttacgatcacattgaaacgcatgacatattaatcgtaagaatttcttaaggtttgagaaataaaaatgacagggctcgccgctacaatagaaaacaggaaaagagagggaaggagaaacaaagttgacttatatcgtacaaacaaacgggctgaccaaaacgtatcagggcaaagaggtcgtatccaatgtcagcatgcatattaaaaaaggtgaaatctacggctttctcggcccgaacggcgcggggaaaacaaccattatgaaaatgctaacgagccttgtcaaaccgacaagcggtgaaatcatcatccttgggaacaagttcacccacacgtcatatgaggtgctggggaacatcggcagcatgattgaatatccgattttttatgaaaacctgacagctgaagaaaatttagatctgcattgtgaatatatgggataccacaataaaaaagccatacaagaagtgctggatatggtgaatttaaaacaaatcgacaaaaaacccgtcaaaaccttttccctcgggatgaagcagcgccttggaattgcgcgtgccatcctcacgaagccggacctgctcattctggatgagccggtgaatggtcttgaccctatcggcattaaaaagatcaggcaattgtttcaagtgctgagcaaagagtacgggatgacgctgctgatctcaagccacctgctgggtgaaatcgaacaaatcgcggacacaatcggcgtcattcgggacggcaggctgcttgaagaggtatcaatggaggatgtcaggggccagaacactgaatacatcgagcttgttacgccgaatcagacaagggcctgctttgtgctggagaaagagctgcaattaaccaactttaaaattttaaatgagaaaacaatccgaatttacgaggctgaagcctctcaggctgccatatccaaagcattgattttaaatgatgtagacattgaatcaatgaacaaaaagtatacgtcgctggaggattattttatcaaattgatcaacggcaatagcatcagtgcgtaaaggaggagagacacgttgatgaatttgatcagaatcgaattaagaaaaatgaaaatgggctggtatatgagaggtgccctcattgccaacgtgatcattatgggttttatgtggctgatcagttattccgaaaaagccgatggcggggtttcgttccaaagtacggatgaagcattcctcatcatcggcaccttcgtcagagcggtatttatcgtatttggcgctgtgctgatcgtaaaattggtgatttcggaatataaaaacaaaaccattcttgtgatgttcacgtacccgatcagccgtaaaaagctgctcaccgctaagctcatgatcgcgggcggactgacgtttatcacgattttactttcaaatatactcatagccgccggtttcttttggctgaactcgatctgccatttcataccgggagagcttacttccgagatcatttctcaacaggcggtcaaaatggcggttttcgcttttggcgccgctggaaccagtttagttcccatcttttttgggatgcgtagacactcggttccggcgaccatcatttcatctgtagtaattgtgatgctcatcagctcaacaagtccgggcttctcgatttcatctgttgtgtatatcccgttatcgttagcggcattcggattgttcttttcctacatggcgatcaggaatgcggacaagcaggatgcgtaaacaaaagcgcccaatatgtataaaaggccgatgctgtcagcatcggcctttccattatgagtctgttcttgtttcaagataatgcttcttgccaatctctttgctcatcatatagaaatggaagcaatattcaccgattgccatgacgatcgcgccgaataaagccgccaacgcaacttcaccgccagtcatccctagggaaagcggcatgcccatcagccagatcacaagaaaggccaagccaaaatcagccaaagttgcaatcatattattccatctcggcaatacataaagatcgcccagcaaataagaaataacccctaacacaatcgtcattagcagcgtatcaccaaacgtgaaaccaaagcccagaccaagcaccagatacaacacaataatcgtcataatacctttaatcgcgagcgctttcacatgtgtcattacaattcctccttttgtcatttgatttgttatgtataattcctcaaatgtaaaaagttaaaccttatttcttttcggaggcgggtgcaaatctgctggggaggggtcaatgatgtgaatccaggaattgaggctgcggcgcttcgacagcggaaacgtgaagcttgtactgcaccggacgctgctttgatgcccaacagcccattatgtttgctgtttttagatgaataaatttaaaaacttctcctgtccctccgtcatcacttctgaagtaatgaaatatgatgaaaagagatcaaggggaggtgacgtgatggcggtcgtgagagcaacgagtgcggatgtcgatttgatggcaaggctgctcagagcggaagcggaaggcgaaggcaagcaggggatgctgcttgtcggcaacgttggaattaatcggctgcgggcgaattgctcagattttaaaggcctccgcaccatcaggcagatgatttatcagccacacgcgtttgaggctgtgactcatggatatttttatcaaagggcgcgagatagcgagcgtgcccttgcacgccggtcgattaatggtgaaaggcgctggccggcaaaatttagtttgtggtacttcaggccggagggagactgtccagcccagtggtataaccagccgtttgtggccagatttaagtcacactgcttttatcagccgacggcggagacgtgtgaaaatgtatataacacattttagagacaggacaccgttcaaattgaacggtgtttttatttgaaaagatgcaatggaaaatattcctgtgagataatcgaagaaaaaagagctgacggagatgacagaatggcaacaattgacctgcaaaagaaaagtgtaaagatcgtactggagaaaaagcagttaacgaaggtgacggctcgtgtcggactggttcttgatattacgggatcgatgagaccgctctacaaaaacgggacggttcaaaatgtggtggagcggattttggcagtggctgatcagtttgatgataacggtttgctggatgtatgggtgtatgataatgaattttcccgattaaagccagtttcagaaaaggatttttcgggctatgtcgatcgtgaaattttaaataatgaccgcttgcataaattcggcagaaatgatgagtcgccagtcatgaaggacgtgctgcgcaaatatgttacggaggaaccgagctcgtatcctgctttcattgtttttatcaatgacgggggctgtaaaaagtcaatcaaaccgataattgaagcttcttctgataaaccggtgttctggcagtttgtcggcatcggaaacggaaactttgattttctcaataaactggatacgttagaagggcgtgtcattgataacacgaacttcctgcatatcgaagagattgaccgcatttctgatgatgagctttatgatgctctgcttgctgaatttccattttggctgaaagaagcgaaggaaaaagggattgtaagagaacaagagcctcctgctgaaaagccgaaaaagaagggctttttcagcagattgttttcgaaataactgataaggcactgagccattctgcgaaatggctcggtgtttttgtttttttaagatcatgtgaagaaaaatagtccaaatgggcggcttgcaaacgacaggatatgcagaaaacgcgtcattcagccagctttcggcatgttttagcggcaggcttgtgagggaagacctgtttttgatgttcagcgcttacaatcagttcacacttcttcacagtcgtttaacaatgatttcctataatggagacgatcaatgaggagagaggggatcttgaatggcatacgacagtcgttttgatgaatgggtacagaaactgaaagaggaaagctttcaaaacaatacgtttgaccgccgtaaatttattcaaggagcggggaagattgcaggactttctcttggattaacgattgcccagtcggttggggcctttgaagtaaatgctgcgcctaaattctcaagctatccgtttacattaggggtagcgtcaggtgatccgctttctgacagtgtcgtgctctggacgcgcctggcacctgatccgctgaatggcgggggaatgccgaagcaagcagtgcctgtcaaatgggaggtcgcaaaggatgagcatttccgcaaaatcgtaagaaaaggcactgaaatggctaaaccgagtcttgcccattccgttcatgtggaagcggacgggcttgagccaaacaaagtgtactattaccgtttcaaaaccggccatgaactaagccctgtcggaaaaacaaaaacactgcctgcccctggcgccaatgtgccgcaaatgacctttgcatttgcttcctgccagcaatatgagcacggatattatacggcctacaagcatatggcaaaggaaaagcttgatcttgtcttccatctcggtgattacatatatgaatacggcccaaatgaatatgtatcaaaaacaggcaatgtccgcacgcacaacagcgcggaaatcattacgctgcaagactatcggaaccgtcacgctcaataccgttctgacgccaatcttaaagctgcacatgcggcattcccttgggttgtaacttgggatgaccatgaagttgaaaacaactatgccaataaaatacctgaaaaaggacagtcggttgaagcattcgtgctccgccgcgcggcagcataccaggcatactatgaacatatgccgctccgcatttcctctttgccgaatggcccagatatgcagctgtaccggcactttacgtacggaaacctggcgtccttcaatgtgcttgatacccgccagtacagggacgaccaagccaataacgacggcaataagccgccttctgatgaatcgcgcaatccgaatcggaccctgcttggaaaagaacaggagcagtggctcttcaacaatttgggcagctcgactgcccactggaatgtgctggcgcagcagattttctttgccaagtggaatttcgggacaagcgcaagcccgatctacagcatggattcgtgggacggctacccggctcagcgcgaacgggtgatcaatttcattaaaagcaaaaatctgaataatgttgtcgtactgacaggtgatgtacacgcaagctgggcatcgaatttgcatgtcgatttcgagaagacaagttcaaaaatattcggagccgaatttgtcggaacctcgatcacatccggaggaaacggcgccgataagcgggcggatacggaccaaattttaaaagaaaatccgcacatcaagttctttaacgactatcgcggatatgtccgctgtacagtgacgcctcaccagtggaaagccgattatcgggtgatgccgtttgtgaccgagccgggcgcagccatttccacgcgggcttcattcgtttaccagaaagaccaaactgggttgagaaaggtatcatccacaacaatccaaggcggggtgaagcaatccgatgaggtcgaagaggatcgtttctttgcgcacaacaaagcccacgaaaaacaaatgattaagaagcgggcaaaaatcacgaattaaggagtggaaattatgttttcaaacattggaataccgggcttgattctgatcttcgtcatcgccctcattatttttggcccttccaagctgccggaaatcgggcgtgccgccggacggacactgctggaatttaaaagcgccacaaaatcacttgtgtctggtgatgaaaaagaagagaaatcagctgagctgacagcggtaaagcaggacaaaaacgcgggctgaatgctgatgaggcagacaccgggtctgcctctttttttatgaaagggagggcttttttgaatggataaaaaagaaacccatttgatcgggcatttagaagagcttcgccgccggattatcgtaaccctcgcggcattttttctatttctcatcacggcttttttgttcgtacaggacatttatgactggctaatcagggatttggatggaaagctggctgtgcttgggccgagtgaaatcctctgggtgtatatgatgctttccggcatttgtgccattgcggcttctatccctgttgccgcgtaccagctgtggcgtttcgttgcaccggcgctgacgaaaacggagcgcaaggtgacgctcatgtacataccaggtttatttgcgttgtttttggcgggcatctccttcggatactttgtcttgtttccgatcgtgctcagctttttgactcatttatcctccggccactttgaaacgatgtttacggctgaccgctactttcggtttatggtgaatttgagcctgccgttcggcttcttgtttgagatgcccttggtggtgatgtttttaacaaggctgggcatcttaaatccttacagactggccaaagcgagaaagctgtcctattttctgctgattgtcgtatctatattgattacaccgcctgattttatttctgattttctcgtgatgatcccgcttcttgtcctgtttgaagtgagtgtcaccctatcggcgtttgtctacaaaaagaggctgagggaagaaacagcggcggccgcttagtgcagcgtaccgcccggtgacttcacatcctcatcatattgtgcggccgtaacagcggcgattctcaatgcccggacaatcgtgtccaggctgaggctcggcgctgttttgtcgattgtttgctgcggaatgtaaggaatatgaataaaaccgccgcgaatgtgcggggatgtccggctaatgtgatccattaacccgtagaacaaatagttgcatacaaaggtccccgctgtgtaggaaaccgcagctggaatgccgtgttccttcatcttagcagttattcgtttcacgggaagccctgtccagtaagcggcgggcccatctggagaaatctcttcatcaatcggctgatgtccttcgttatcggggattcgcgcatctgcaaggttgatcgccacccgttccggtgtaatctgcatccgtcctcctgcttggccgacacaaatcacgatatctggctgatgtgtttgaatggcttggcgcagagtgcccagagcggatctaaagacggttggaatttgttccgctgtaataatggcttcttccgtctcgaagccattaagccgtttcgccgcttcccatgatggattgacggtttctttgtcaaaagggtcaaaaccagtgatcagcactttttttctcatcttctcatctcctttttcttttattctattgtttatttatgggtttttcatcaaaataatgtaaaggagtgaatcataatggagcatttaccgcagcagtatcgtcatttattcccaaccttgcagacgcatacgatgcttgccagctgttctcagagcgcattggcagagcctgtatcaagggcgatccaggattatcatgacagcctgctgtataaagggacgaactggaaagaagcgattgaaaaaacagagtttgcgagaaacgagtttgcaaagctgatcggggctgaaccggatgaagtggcgattgtgccgtcagtttctgatgcactggtttctgtagcatcgtccttaactgcatttggaaagaagcacgttgtatatacagatatggattttccggcggtgcctcatgtttggcaggcacactccgattataccgtatccgtcattccatcaatagacggcgtgctgccgcttgaacaatatgaaacgcatatttcggatgaaacagtactgacgtgtgttcctcacgttcattatcgtgacggctatgttcaggatataaaagcgattgccgagatttctcagagaaagggctctttattgtttgtagatgcttatcaatcagccgggcatattcccattgatgtgaaggaatggggcgtagatatgctggcagcaggcacccggaagtatttgctcggcataccgggtgtggcgtttctttatgtgagaaaggagctggctgacgcactgaaaccgaaagcatcagcttggttcggcagagagaacggatttgatggggcttatgcgaaaggcgcgcgtcgttttcaaacgggcaccccagcttttatcagcgtatacgcagctgcagcggctttatcgctgctgaatcatattggggtttctcatatcagggatcatgtgaaaacgatctgtgccgatgcagttcaatatgccgctgaaaaaggcctgcagctggcggcggcacaaggtgggggtcagccgggcatggttgcgatccgggatgagcgggcatcggaaacggcggcgttgctgaagaagaaaaaagtgatttgcgcgccgcgggaaaatgtgatccgtctcgctccccatttttataatacgaaggaggaaatgcggcgcgcgattgatgaaatcgcggcgaaaacgatccacaagtaaacataaaaaaagcccctgaacattagtcaggggcttttcatattaatgatctaccttcacgcgcttcataaagaaagcgccaattaaaccgataatggcaacaatcattgcaaacacaaatgcgtgctgtacacccgctgtcaaagcttgcgggatgactgccggatcggcagggtttttaactgtactcatataatcatgctggcctgcagccataatgctgaccgcaaccgctgttccgatagcgccagccatttgctgcagcgtgttcataatggcggtgccgtctggataaaattcgcgcggcagttggtttaaaccgtttgtctgtgcaggcatcatgatcatagaaatcccgatcatcaagcaggtgtgcaggatgataatcagcacagctgttgaagtggtcgtgacatttgagaagaaccatagtacaacggtgacaatcacaaatcccggaatgacaagccatttcggcccgtatttatcgaacaagcggcctgtaacaggggacataaatccatttaaaataccgcccggcaagagaacaagaccagatgcaaatgcagtgaggactaagccgccttgcagatacatcggcagaagcagcatagatgacagaatgaccatcatacaaatgaacaccatgatcacacccaaaataaacatcgggtatttgaacgcacggaggttcatcatcggctgcttcattgtcagctggcggattgaaaataggataaggccgacaacgccgacaatcagcgacacgataacagtcgggctggaccatcccccggagccttcacccgcgttgctgaatccgaacacaatgccgccgaagccaatcgtcgacaggatgatagacaatacatcgattttcggctttgtcgtttcagatacattctgcatatatgcgataccgaaaacaagcgccagcacaaggaatggaagagagatccagaaaatccagtgccagttgagatgctccagaaccaatcctgagaaagtcgggccgatggcgggcgcgaacataatgacaagcccgatcgttcccattgcggcgccccgtttatgaggcgggaaaatcaccaagattgtgttaaacatcagcggcagtaaaagaccggttccaagtgcctgaacgatccttgccgccaataaaaacgggaagcttggcgcgagtgccgcgatcaaggttcctataattgaaaagattagtgacacggtaaaaagctgtcttgttgtgaaccactgcaacagcagtcctgaaacaggaacaaggataccgagtacaagcaggtagcccgtcgttaaccattggacggttgccgctgtaatgttcaattccttcataaggtcggttaacgcaatattcagtgctgtttcactgaacatgccgataaaaccggccaacagcaaggaaatcataatcggcatcactttgtattgctgagatgctttagctgttgtttccaaaatcatttcccctctctatcaactgcatgtagtatgtcgtttttttatctcttcagcaggtcaggaatgcagctggagatatgaaggagcggcgtactgttttttgccgtcaaagataaaagaatgccgccttcaatcatcgcgttaaccacagtgctggcttcttttgcacggttctcgctgcagccagtctgccgcagtttttcctcatatacagaggcccattctttgtaggcttcatgacaggcttcgcgcaacggttcgcttttcaatgacgtctcagccgctagcaagcccacaggcaagccttcaatgtcttccgtacatgaaaactggcaggagagctccttcaaaaaggcttgaatgccttccgctggatcggtgcaggcttccatgcagtccgcgattttctgacggatatactccttcatctcattcacggcttcgatcgcaagctgttctttacccccgggaaagtggtagtaaagagagcctttaggcgcgccgctttcctttataatctggttcagccccgtgccgtaatacccttgcagctgaaaaagccgggtagctgccgaaaggattttctcacgggaatctccataactcataacattcccaccttactgaattgcaatcaaaaatatagtgactggtctattatcttgattcaatcatcaattgtcaagaaaaattcattgtatgaaaagacaaaaaaagaaggatatgacaacaaaaaatactgagagaaaagctgactgatcttttgactgaatagataaaatgtacaatgattaatcatcatatggatgtaaggagagaaatagatgaaaaaacaacgaatgctcgtactttttaccgcactattgtttgtttttaccggatgttcacattctcctgaaacaaaagaatccccgaaagaaaaaacgcagacacaaaaagtctcttcggcttctgcctctgaaaaaaaggatctgccaaacattaaaattttagcgacaggaggcacgatagctggtgccgatcaatcgaaaacctcaacaactgaatataaagcaggtgttgtcggcgttgaatcactgatcgaggcagttccagaaatgaaggacattgcaaacgtcagcggcgagcagattgttaacgtcggcagcacaaatattgataataaaatattgctgaagctggcgaaacgcatcaacgacttgctcgcttcagatgatgtagacggaatcgtcgtgactcatggaacagatacattggaggaaaccgcttattttttgaatcttaccgtgaaaagtgataaaccggttgttattgtcggttcgatgagaccttccacagccatcagcgctgatgggccttctaacctgtacaatgcagtgaaagtggcaggtgcccctgaggcaaaagggaaagggacgcttgttgttcttaacgaccggattgcctcagcccgatatgtcaccaaaacaaacacaaccacaacagatacatttaaatcagaagaaatgggcttcgtcggaacaattgcagatgatatctattttaataatgagattactcgtaagcatacgaaggacacggatttctcggtttctaatcttgatgagctgccgcaggttgacattatctatggataccaaaatgacggaagctacctgtttgacgctgctgtaaaagccggagcaaaggggattgtatttgccggttctgggaacgggtctttatctgacgcagccgaaaaaggggcggacagcgcagtcaaaaaaggcgtcacagtggtgcgctctacccgcacgggaaatggtgtcgtcacaccaaaccaagactatgcggaaaaggacctgctggcatcgaactctttaaacccccaaaaagcacggatgttgctgatgcttgcgcttaccaaaacaaatgatcctcaaaaaatccaagcttatttcaatgagtattgaagaaaagaaggcgaataagccttctttttttggctttttaggaccaataatgacctctgaatcttaaaatttctttaaaaataagccaaaattaccctttacttaattaatttggtaacgtaatataattgaagaatttgttacaaaaaaaggaggatattatgaaatttgtaaaaagaaggatcattgcacttgtaacaattttgatgctgtctgttacatcgctgtttgcgttgcagccgtcagtaaaagccgctgaacacaatccagtcgttatggttcacggcattggaggggcatcattcaattttgcgggaattaagagctatctcgtatctcagggctggtcgcgggacaagctgtatgcagttgatttttgggacaagacaggcacaaattataacaatggcccggtattatcacgatttgtgcaaaaggttttagatgaaacgggtgcgaaaaaagtggatattgtcgctcacagtatggggggcgcgaacacactttactacataaaaaatctggacggcggaaataaagttgaaaacgtcgtgacgcttggcggcgccaaccgtttgacgacaggcaaggcgcttccgggaacagatccaaatcaaaagattttatacacatccatttacagcagtgccgatatgattgtcatgaattatttatcaagattagacggtgctagaaacgttcaaatccatggcgttggacacatcggccttctgtacagcagccaagtcaacagcctgattaaagaagggctgaacggcgggggccagaatacaaactaatgagataaataaccttgaagagtcctattcttcaaggttattctgctttcagcacaatggttttcgccgccatatcatgaacggtttgttttttcttcgtaaatgcggctgtcaaatagatcaggcgggagaatacatgcacccacgctatgatgtaacggacaatcgcctgtaggaaagaaattttctcgtgtgtttcgtccctcacgatttgcagcccgatgatttttttgcccagtgtgcccttccaatttgtcagcggcatcagcaaaggatacacaatcagcatcaatatggcgacaataatgacaccagcggacccatcgccaaacgtaaatccggctgccaaaatcactgctgcggcaatgattacatcaagtaaaagagcgcaggcgcgcagcatgaaaccagctagttccaatagaaacactccttaaaatgttaaataaacacctaatgattgtaaaaaagaagggcctaaagtgggaataggtgataagccttaaatcacaaaagttggtgaaaatgtcataggtaaattggcataatcagccagcttatcacattaccaaattcttttttagcccgaaaccaagccctcagaagttatttttgttaaaatagaaaagttacaacagaattcggagggtttattgtgggaaaagtgaaacgaaatgccccttgcccatgcggcagcggcaagaaatataaaaaatgctgcggaagtaaagttgtcgacttcccggcggaactagcggcaaaagaagcgaaacaaattcaggaagacttagtggagtatgccttcacagtacatagagaaagcatttcaggctttatcaaccagcatgattttctttctgctatggacagacagacgaaagacatcagcgtatttaacttaggaatctggggaatcttcttccacccgcttgctggtgagaagacaatcttcgaagagtaccttcagaaaaaaggcgattcgatcactcgtccgaaaacgcgtgagatcgtagaatcatggcagagcatgacgcctgctttattgctgctgaaggacctgaaggaaggcatcattcactttgaagatgtcattacggcaaaacaattcgaagtggaaatggacgccagcaatcaagaccttcctccagtgggaagcctgattcttggatacccaatccacgaagcggaaaaagcagaattcttcatgcagttcacgatcttcccggtgaagagaacagaagcgctgatcagcaaggtgaagaaatatgcggatgccgctgtgaaggacggcaaaacgccggaggacttcatgaagcaggaattcaacaacgttctgttcgcgttgttagctgagaaagatgaagagccacaagcagagaaagcggaagtaagcactgttgagtgggcaaacgacttggagaaagaaaccgctgcggctattgaagaaggcatgagcggggaagagtatccgactgaattgatcccagctgttattgacatctggaaaacattctgcgagaaaaaatcacctgtcatcagaaagccggaagcttttgcggcggcagttgaatattatgtaaacgcaatttctcttaacggcgcgtccgtttcccaggctaaactggcgaaaaaatacggcgttagcgcatcaacgatttccagccgttacaaagaaattgaaagcacgctgcaagatgaagcagatcgttttgcacaagcgttatcctcataatggaaaaaaccttgaaaagccaggcttttcaaggtttttttatttctgaaacggaattttgatttctaaccggaagacggggtggcggtaggtaaaatccagcctgccaaaagcgctcttcaccagtttttgaatgatatatgtgcccatgccttcatgagcgccgtttttcgttgagcggccaaacgattgataaattgtatcgagcacttttgggtccatcccgggagtgctgttttcacaagtcagtacataaagtccgctgcgcagtgaagtttccagtttaatctctgctttttctcgggcctccgctgcgctgtcgagcgcattttctaatatgttgccgaccaagctgacctgatcagcaggcgaaaacggaagggaagaaagcggtgtatgcatatgcagcgaaacactcacattcgaggcgcgggctttttctaaaaaatcataaagcacccctgcaacgtacgcgttctctcctttcaaaaaacggtcatattggctgtattgatccgcccagttttgaatatatgcttgtgtatctgccttgggctgagctgatttgattgcagtgatatgtttcattgtgtcatgattctggcttctgacatcaatcagcatttgattggcgtgctgttcagcttgagtcagcttatcaatttgatcagaaagccttgcctgcaaagcagactgtccgatacggagcccttcacaccctgcaaatatcgcgattacacataataccggcatgatgtctgtgccaatcaacactactcccgccgacatcacttgaatcacagcaatccacgcacaaagccctgaggaacagtgtttccacacccgcttcgtattccaaatgtacaatcctgcagcagctgcgcctaaagcagcggcgagccaagaggcggctgtgctgtgtgaaaaagcagcagctccctgataacatatgaaactaaataaaaccagataaagacattgaaaaagggtaatcacgttctgaactcctcaaaagtagtagttttgaaaataatcaagctgctgcttggtgatcatcgcttttttagacgttccctcaaaagaaactgtaaatgaatgcttggtataagcggaaaaatgctttatgtaatgaatgttgataataaaggaacgatgcgaacgaagaaaatccttttcgggcaggtcgcctttaatatcatttaatgtttgatacgtttgcacctcttcggcggttgtcacaatcgtcgtcgaacgtcccgtccgttctgcgaaaataatatccttcttttgcaggacatgcatttcagacttttgctttatcaatatacgcccattcaaactcgtttccgttttctttttcaagtaccggtcgaaggaagcggccagacggtcggcatagtacggcttcataatataatcatggacgttcaggtcaaaggcgtgaaccgcataaccgccgtggccggtaacaaaaatcacatccacatcaagtgaatgggatttgatcaaatcagcaagctcgtagccagacatatggggcatctcgatatcggcaagcagcagatcaatgtctccgttctttacccgcctgtaggcttccttcgctgaatcggtggaaaagacaatttcgacgtcctgcattctggacacgatcgcttccagcttctctaaatctactcgataatcatctacaagtccgacttttaccattatcattcccctagttacatagaatcatctttattctatcccatttcgcgacataaaaagaactcttcgcgacaactttatccaactaatccagcttttcgtatatagtcattactagaaataaagataagggagattgtgacatgattacactgaccgattgcagccgcaggtttcaggataagaaaaaagtagtcaaagcggtgcgagatgtaagtttaacaattgaaaaaggagaagtcgtcggcattctcggagaaaacggtgccggcaaaacgacgatgctgagaatgattgcttccttgcttgaaccatcacagggtgtaatcacagtagacggctttgacacggtcaagcagccggctgaagtcaaaaaaagaatcggtgtcttattcggaggagaaaccgggctttacgacaggatgaccgctaaagaaaatctccaatacttcggcaggctgtatgggctgaaccgccacgagatcaaagcaagaatagaagatttatcgaaacggttcggcatgcgcgattatatgaaccggagagtgggcgggttttcgaaagggatgaggcagaaagtcgccattgccagagcgctgattcacgatccggacatcattttatttgatgagccgacaactgggcttgatattacgtcaagcaacatcttccgcgaatttatacagcagctgaaaagagaacaaaaaacgattcttttctccagccacattatggaggaagtgcaggcgctctgtgacagtgtcatcatgattcacagcggagaggtgatttaccgaggggcgcttgaatcactatacgagagcgagcgcagtgaggatttgaattacatctttatgtctaagcttgtcagggggatttcttaaatgctgagccatatttataaaaaagaaatgatcgacgctttgcgcgacagaaaaacgattttactcacaatcttagtgccgatgattatgatgcttggacttgtcttcttttatgaaagcatgctgtccgacaaaggggagcagtacacgctggctgtcggccattcgctgccgcccgcactggaaagcaagcttaatgagattgacgaaatcagcgtaaaaacatttgcaaagcctgaagaggcagttgatgaaggaaaagcagatgcctatctgaacgtcccaaaagagttcgactcatatgtcaacagcatgacaccttttaaggttgatgtttacggcaattcaatcgatcaagggtcgtcaaatgccatgcagcttgtgcagtctgccttagatcagtacaaaaatgaaattgtgcagcaacgtttaacaaataagcatattgatcaatcggtgatccagccgtttacaattcagcaaaaggaagcggatgaggagaaagggacttccgctattatgctttccgccattctgcccatgctgattctgacttccattgtttccggcgcaatgccgatcgctcttgatatcatggccggtgaaaaggaccgaaagtcaatcgaggcgctgctattaacgccagtcagcagaaacaaaatgctggtcggcaagtggcttgcggtttccacttttggcgtggcttcaggtgtattggctttgatgtttttgattttgtccaccgtgttatttaccgaaaatttaaaaacggccttccagctgggagatcatatgtggagtgtaatcggcgcttcagccttaatcattgtgctctctgcattgctgatatctgcgatggagcttttcatcagcatcatgtccagctcggtaaaagaagcgcaaagttatatgtctctcgtcgtctttctgcctgtgttcccgatgtttttcatcttcagcaaggcaccgaaccaatttgacttatcatactttctcatcccgtttctgaacctgcatgcgttatttaaacagcttttattcgggatggttgacccggctgccattttgtctacgtcaggaaccatcgccgtgctcatcgccatcttctttttactagccagagcctgcttcctgaaagacaaatgggttcttccaaaataaacttgcgaaaggagaaatacactttctcctttttgtatatcctgaaaaaagaaggaaaatagaaaaaggatatctaatacaaaaagtgaccctgcactatttttcatcaaaattggtttcaaaggagaaggaacaatggatcaaacacgtacactcggcaaaacgaagctgaaggtgaagcggatcggattcggcgcgaatgcggtcggcgggcataatctatttccaaatctaaatgatgaaacagggaaggatttagtgcgcacggcattggatggcggcgtcaattttatcgataccgcctttatatatggattggggagatctgaagaattaatcggcgaagtcgtacaggaacgcggcgtgcggaatgagctcatcatcgccaccaaaggagctcataaagaagtggacggcagcattgaattagacaatagccgggagtttcttcgcagcgaggtcgagaagagcctgaagcggctgaaaacagattacattgatttgtattatgttcactttccggatggaaaaacacctctcgctgaagtggcgggcactttgaaagagttgaaggatgaggggaaaatcaaagcaatcggcgcttcgaacctcgattatcagcaattgcaggattttaatgctgatggctatttggaggtcttccaggccgaatattctctcatacagcgtgatgccgagaaagagcttcttccatactgtgaaaaacaaggcatctcctttattccttactttccgcttgcgtccggactgctgacaggaaaattcacgcgagacacagtctttgatgatttcagaaaggataaacctcaatttcagggtgaaacgtttatccacaatctcaaaaaaatagataagctgaaagcagtagcggaggaaaaacaagcggatacggcacatgtcgccttggcgtggctgttaacgagaccggcgattgatgccattattccaggagctaaacgacctgagcaattacaggataacctgaaaaccttgaacattgaactcaccgaagacgaagtgaatttcatcagcgacatttttaaataaaaaggaaatagccgtcaaggctatttccttttggtgttttattctttgatgaatgcttcgactaattctgctgctctgtaatcatccatatcaagctgccattggtcgatgtcatttttcttcattttcacttcaactgttttttcagatgaagcaggtccaagctttttaaattcctcagggtagacttgaagcgcgtatttcactgcctcttcatagctggcactagagtttttactgtagtagtctttcactttgtcttcgatacggtctgaaagagaagatgcatctacaggtttaactgttgcttcaacaattgcttcgtctttagagattgaagtcgtttttgcttgaatggaagagtttttgcttaatccctctttaatgccgttcacgatattatcaagcgctttgctgtccgcatatgtgctggaaaggccggaagctgagagataaccgtctttggctgattcattgaaatcatttacaatttcatttttgttagcgccggtgattttttcgaaatcggcgttatctttgccgaaaagaaggacatcaacataagctgataacgcttttgcagaatcttggagcttatctgccgtcgccaggatttttttgtcttttccgtcaattttaaaagtaactgattttggctttttatcaccgtaagattccggcgtatagttaagctcgtattgcttgcctttatctacaacgaagaaaagatttccttcaacggatttgtcagcgttaatcgtgctgccttgaagcttttcgctatagtcttcagggtctgtgtcagacattttggtatcaccttgatacaatgtgaaatccatactgtctacattcagcgggtcttttcctgtgtttttcaccgcgacattgacttttaacacaagctggtcatctgaagtggacttatcatatttagacggaagtgtgtaagagacatccttgattttgacttgagctatatctgagcttttttctgtttctgattctttcttctccgcgcttgttttgctgccggaacaagcagctgtaaacatcatcagcagaagaattaggaaaacagcgtacgtttttttctgaaacattcatttttcctcctcaaatggtttaggaaaggggagtcttttgtctttgagaaatggatctttttgaatggattagcatcatataaccaaaaaaatcagttcttttctcacggtttttaccggattttctggaaactccgccctcctttgtcatgaatggacctataaaaagttacaacggaattaattttaagattattagcttttatattgaataggttcatcatcctatttttggtgaaaaatgttctggtaaaactggtaaactcagaaaactgtgtattttagactattactttttgattagttggagggaacttaagaaggatgaaaggggctgcctttgtgaagaaagagggactgaaacaaaaagcactggaaatcggccgggtgccgacacacttaaaactggaaattgaagattatggcggtgatgacaaaagagcctatttttgttggagagatcctcaggatgagaatatcggcattatcgtggaacttggaccggacggggagctggaatccctttcccgtgatattgagcctgaaagcggagaaaggctgtctgaggagaaactagaggatatcatgcgccaatttgtcgagactcatcatccgggggcactctctgcctttgttcgtgaagaaaatgaccgtgcatacggcgataaagtgagattttcatatgttcaaatggaggctgggcttcctctccccatgagcggatttatggctgatgtttccttatcaggtgagatcgtttacttccgctattacggcgaagcaggcagcatcatcaagccaaagagggtcgcggatgttgaagaggcacttgcctttatcaagaaggacgtagagttcgaccttttgtttgaggttctccatcgttctgtttacaaaaatggagatgatcagccacatttggtgtatgagcctgaatgtagggcgattaccgtacctgcggatttggttcaagaagaacaaggaggagttgatgatgacgataattacagggagcctgagagctttcctctccctttattcgagggcatccgcgaaaaggccgatcctgacagcatgattggtattgaaaatgggtttgtcaaagagcgggaagcggatttgggagatgggagaatcggaatcgtttggcggaatccggatgaccctgtgtatcagccggcggataaaagcatggacagctggtttaagggacggactcatcaagtgctgaaaaccatctataacaaagaaaccggaaaactcgaaggcgtcatgtcatttatggaggaaaaagggccgctgacagtaactttggcagagtgcgaaaaaattgcgcttcgctttctgtttgctttatttccgaatgccgatcaatattttaggatcagatacgatgaaaaggatgaagaagaaaacgcagtcactgtttttacatttgaaacgcattgtcacggagttccgctccgatttgggcagatcaaaatttgtgtcagccgccagacagggtatatcaccgtttatatgggaccggatattgacccaaatgagctggcaaccattgatcctgtgccggccatttcagttgaacaagccaaggctatcttttggcagcattttaaagttgagcttggctgggaaagagagtacggagatgatgaagaacacagctaccggctcgtctataagccggtgtatccgcgttttatcgatgcacatacaggagagcctgtcttcagctcatggtaaaacagccaaaagtcacgcaattgcctcaggtatagaagagagtacgtgatgaaagtaacagaaagaatctcgaaaaacaatgacaataatagaaaaggacctttcttcactttaaaagaagaaaggtctttttatataataaacaggattctctttgtcgtagactctttgaaagggatgacttcattggttaataaacagctgaaaaagatggcgcaggagatcggaaatgtaccgacgcattatgagcttgagatagaagattacgaccaaaagcaaaagaagaacgggcaggcatattttatctggaaggaccctaaagatccggaaaggcacattacagttgaacttagaaatgacggcgctttgctcaccttttcaacaactgtccgctccgagacagacaaaaaacttccagatgctgagctgaagctgacggctcttcagtttgccgctgcccatcatcccggcacatttatgaattttcattttcaaggcaaggaagaacgggggcagcacatccggtttgtctataccaaaatggagctggggcttccgattcccaattcaggctttttaattgatatgacacgcagcggtcagattgtccactttctatattacggggaagggcataaagccgaagttccgacggaatttgtagcaaaagagaaggttgtgtcccattacttaaacacaatgtcttttgagctgatgtacgatgtcattgatggcgaacaggaaccaaggcttgtatatgaaccgattctcccgggatacagctatcccgcagatgtagacgaaattgtgcccgatcagcatatcgcagatgaaagaatagaaaacacggcgtcactgccgccgcttcagaacaaggaagaagttgatatatttgccttgctgggttttacctctgatatgcagaaagtcagtgaaagagactttggggaacaaattggaagcacgtggcgcaggggcgctgcgccggagcgtaaggatttaagcataggaagctattttgaaacgagaaataaaaacacaatcaaaatgaagacggataaaagaaccggaaaattaaaagcagcgctttcttttatggagcggccgaacaaccgccaatgctccacggaagaatgccaagagatagcgcttcaatttttgtatgccctctatccgagagcggctgagtttttcagggtgaatcccgtccgaattgatgaaagagggagagtccgcaaccatttttctgtctggtataaaggagtgccgctgcggttcggcgctgcccgcatcattgtcaatccggaaactgggttgattgacgcttttatggcgcctgatattgaacctgaacaattggaagcgataaatcacaggccggatgtttccgctgaagaagcaagagaagcgtttttagccgcttttgatgtgaagctggaatggcagcctgattttacagcaggcagtgaccagcactacaaacttgtctataagccggtttacccttcatatattgatgcgcacataaggaaaaagaaaaggctgtgaggggtgtctagttaggaatcatctccaagtgggggtagtccttgaatcgtttccaatccccgccccattcaaaaccgagtgtcttagcgatctcgacaacctccagccaatctgattttccgttttgattgccgtcatattccatatcccatatgatgcttccatcctttttttgaagggcgaaatcaatcgctaaaccatagttatgatacgattcccctcctcttgcataggtgacaatattccctttttttgtacgtccctgtttatataattcatcttgttccttaaaggacctgaatccttcagtaatgacgacggtaatgcctttattcgctgcagcggctttgagtgcatcggcattctgcttcacaatcggatgaagatccgaggggacaggcatgtcctgcagggcgttttgagaatgccattcatgccgaatataactaaaacaaagatctagaagaaatagaatacataagataacaaatgtttttgcgggtaacttcatatcggtctcactttctcaagatgtgctgaatgtgaacgcttttaagtgattgactctctctaaaagcgaacagctatgataaaatataacataaatagtagcaggaggaaggaggcagaccgatgagagcaaagattccatcagaagaagtagcagtaaagctgaatgaatggtacaagctcattcgcgcatttgaagcagatcaagcagaagcgttaaagcaggagattgaatacgatttagaagatatggaagagaaccaggacttgcttttatatttttctttgatggaattccggcatcgaatcatgcttgataagctgatgccggtgaaagacagcgacaccaagcctccgttctctgatatgctgaacgaaattgaaagcaatcagcaaaaactcacgggcttattggaatactacttttattatttcagaggaatgtacgaattcaagcagaaaaatttcatattagcgatcgaccattataaacatgccgaggaaaagctcgagtatgtcgaggatgagatcgaaaaagctgagtttctttttaaagtcgcagaagtgtattatcacatcaaacaaacgtatttttccatgaattatgcgagccaggcgcttgatatctatacgaaatatgaactgtacggtcgccgccgggttcagtgtgaatttatcatcgccggaaatttgaccgatgtgtatcatcatgaaaaagcactgacccacttgtgcagcgctttagatcatgccaggcagcttgaagaagcatacatgatcgccgctgcctattataatgtcggacactgtaagtacagtctgggtgattacaaagaagcggagggctatttcaaaacagccgccgccatttttgaggagcacaactttcagcaagctgttcaagctgtattttcactgacccatatctactgtaaagagggaaaatacgacaaggcagtagaggcttatgaccgcgggataaagagcgcggctgaatgggaggatgacatgtacttgacgaaattccgcctcattcatgagctgtatcttggaagcggcgacctgaacgtgcttacagaatgctttgacctgctggaatccaggcagcttcttgctgacgccgaagatctgctgcatgatacagcggaacgtttcaatcagttggaacattacgagtccgccgctttcttttaccgcaggctgatgaatattaaaaagaagcttgccgagcagcgttttcaataggaaatggcagagaactacaggttctctgctttttttgtgctgttttcaactcggaaaaacagggtattttccactgcatagtgagaaacagaggaggatatcaagtatgtacaaagatttaaccggaaaaacagcgattgtgacagggtcttcaaaaggaatcgggaaagccattgcggaacggttcggacaggagagaatgaatgttgttgtaaactaccacagcgacccgtctggagccgatgaaaccctggaaatcattaaacagaacggagggaaagccgtcgcagttgaggcggacgtgtcaaaagaagaggggattcaggcgctcttggacacagctttagagcatttcggcacgctcgatgtgatggtaaacaactctggttttaacggcgttgaggcgatgccgcatgagatgagtcttgaagattggcagagagtgattgatgtcaatgttaccggaacctttctgggagcgaaagcagcacttaaccacatgatgaaaaacaatatcaagggcaatgtgctgaatatctcaagtgttcaccagcagattccgcgccctgtaaacgttcagtattccacatccaaaggcggcatcaagatgatgacggaaacgctggcgctcaattatgcggataagggaatccgcgtcaatgcgatagcgcccggcaccattgccacagaatcaaatgttgatacgaaaaaggaagagagcaggcaaaaacaattgaaaaaaatcccgatgaaagccttcggaaagcctgaagaagtggcggcagcagcagcttggctcgtatctgaggaagcaagctatgtgaccggcgcaacacttttcgtcgacggcggaatgacactttatccatctcagcttgaatagaacacaaaacagggggattgcgggatgaaaacggactggtggaaggatgcagtggtgtaccaaatttacccgagaagctttcaggacagcaatggagacggaattggggacttgcgggggattatttcccgtcttgactacataaaggagctcggggcagatgtgatttggatttgcccgatctatccttctccgaatgttgattacggctatgatgtgacaaaccataaggcgattatggattcttacggaacaatggacgattttcacgagctgctggaccaggtgcatcagcggggattaaagctggtgatggactttgtgttaaatcacacctcggtcgagcatccgtggtttaaagaagcggagctggacaaaaacagcaaataccgcagctattattattggcgtcccggcacaaagaacggcccgccgacggactggctctcaaactatggatgcccggtctggcaatacgaagagcacaccggagaatactatctccatatgaatgccgtcaaacaagctgatttaaactgggaaaatcccgaagttcgccaggcggtgtatgacatgatgaaattttggctcgataaaggggtcgacggtttgcgaattgatcagctccatctcatttctaagaaagaatatcttccttcgtatgaggactatatcaatcagcaggcagagccgaagccctttcagccaaatggcgaacaaatccatgactatttaaaagaaatgacagatgaagtgttttcccaatatgatgtcatgtctgtcggagaggttggcagtgtcacaccggaagaaggcctgaaatatacgggaacagataagcatgagctgaatatgatttttcactttcagcatatggagcttgatcagcagcccggaaaagaacattgggatttgaagccccttgagctttctgatttaaaatcggttttgacaaaatggcaaaagaagcttgaacatcaaggctggaatacattgttttggtgcaaccatgaccagccccggattgtgtccagattcggagacgatggggaataccgcaaaacatcagcgaaaatgctggcagccgtactttattttatgaagggcacgccgtatatttatcagggagaagaaatcgggatgacaaacgcgccgtttacccggattgaagactacaaagatatccaaacgatcaatatgtatcataaacgggtgtttgaaaaaggctatgatccaaatgatgtgatgagatcgatcttagccaaaagccgggatcacgcccggaccccgatgcagtggaacagcggcaaaaatgccggatttactgacggcacgccttggctgaaggtcaatccaaacttcaccgcaatcaatgtggaggaagcgcagggagatcctgattcggtcttaatctattacaaaaagctgatcagcctgagaaagcagtacgcggacctcatgaaagggagctttgatcttttgcttccggatgatccgcagttgtttgtatacatgagagaaaacagtaaacagcagcttttgtcggtcaataatttttcaaaagagcaggctgtttttcagtggcccaagaactgcggcaaagctcaggcctctctgcttctcagcaattataacaacgatgatcttgctgacgaaatggtgttccggccttatgagagcagggtctatcttctggacaaaacaaactaatgattgaagtagcccggcatttttagccgggttttttagtacatatattcgctctgcaggcgggaagaataaatgaaaatgaaatttattcttgcaaaacgtaatgacttcggtttattatgatataggattacaaaatcgttatcattttgatttaaagtttctgaaaaagaggggatatacgatatgtttaaaaaatggagcggtttgtttgtgattgcagcgtgctttttattggttgcagcatgcggcaactcatcaacaaaagggtcggcggattcaaagggtgataaactgcacgttgtcacaacgttctacccgatgtatgaattcacaaaacaaattgtaaaagacaaaggcgatgtggatctgttaatcccatcttccgttgaaccgcatgattgggaaccgacgccgaaagacattgccaacattcaggatgctgatttgttcgtttataatagtgaatacatggagacatgggttccgtcagctgaaaaaagcatgggccaaggccatgccgttttcgttaatgcaagcaaaggcattgatttaatggaaggctctgaagaagaacacgaagagcatgatcatggggagcatgagcacagtcatgcaatggaccctcacgtatggctcagccctgttctggcacagaaggaagttaaaaatattacggcgcaaatcgtgaagcaggacccggataacaaagaatactatgagaaaaatagtaaagaatatattgcaaaactgcaggatcttgataaactatatcgtacaaccgcaaaaaaagcggagaaaaaagaatttatcacgcagcatacagcttttggctatctggcaaaagaatacggcttgaagcaggttccgattgcagggctttcacctgaccaagaaccgagcgcagccagcttggcaaagctgaaaacatatgccaaagaacataatgtaaaagtcatttactttgaagaaattgcatcctcaaaggtcgcagatacgctcgccagtgaaatcggcgcgaagacagaagtgctgaatacactggaaggcttgagcaaagaagaacaggataaaggtttagggtatatcgacattatgaaacaaaacctcgatgccctgaaagattcactattggttaaatcataagatagtgtgcgccggagggtgcacactatttctttgtgagaaaggaagattaacatgaatctcgtctcattgaaagatatcgttttcggctattcccatacgcctgttttagataaagtatcacttgatattgaaagcggtgagttcgtcggcatcactgggccaaacggcgcctctaaatcgacgctcataaaggtaatgctcggcatgctgaaaccgtgggaaggcacagtgacgatcagtaaaaggaatacagaagggaaacgcctgaccatagggtacgtcccgcagcaaatttcttcatttaatgccggctttccgagcacggtgctggagcttgttcagtcaggccgctatacaaaagggaaatggtttaaacgtttaaatgaagaagatcatcttgaagtagaaaaagcactgaaaatggtggaaatgtgggagctccgtcaccgtaaaatcggtgatttatcaggcggacagaaacagaaaatctgtatcgccagaatgctcgccagcaacccggatctgctgatgctggacgaaccgacgacagctgttgattacgacagcagaaaaggattttacgaatttatgcatcaccttgtgaaaaatcacaaccgcacagttgtgatggttactcacgaacaaaacgaagtacagcaatttttagataaagtgattcgattagagagaggagaaaaaggcggatggaaatgtttgacttggaattcatgcgacgagcttttctagcaggcggcatgatcgccgtcatggctccgatactaggagtgtatctcgttctcagaagacaggccttaatggctgacacactttcacatatctcattgtcaggtgttgccatcggcttttttctcagcaccaatataaccgcagcaagcatagtcgtcgtgaccatcggggcgatcggaattgaatacatgcggcgggcgtatcggacttattcagaagtgtccattgccatcttaatggcagctggtttgtccttcgcgatgtttttaatcagcctttccaaaggcacagccaatatgagcatcgatcaatacctatttggatcgcttgtgacagtaaaccagcagcaggtctatattatcagtattatcacactgctgatcctgctttattttatcgtactgagaaggccgctctacctgctgacgtttgatgaagcaacagccaaaacatcgggaatcaatacaaacgttctctcgttgtcattcagtattgtcacaggccttgcgatttcagtcattattccgatcatcggggtccttcttgtatcggccctgctcgtattgccggcagcattcgccatcagaattgcaaaaggctttaacatggttttcattacagccatactcatttcattattcagcgtatttacgggactgacatcatcctatcagctcgggacgccgccaggtccgtctattaccctgctattgatcgttttgctattaatcggatttgcagttcagggagtttggacgtttatcaaaaaagaagctcagcgcaaaaaaaggcaccgataacatgaaaagcagttttccctagggaaaactgctttttttatagaaacaatccggcaaggcgctcataagattcttttttcgcctcaaaatcaaacacattgcacagaaccatgatttcatttgtttcgtagcggcctgtgaggtctaacagctgttgtttgacagtggttggagaaccgatcaccatccgctttctgttttcttctatgagttttttatcggacgctgtgtagggataggctttcgcctcctcgatgcttggcacgcggctgtccaagccttttccgacgcgaagaagccacaaatcctggcttaatgcgagttcttctgcctcttcatctgttttcgcgcaaatgacaaaaatcgtaaacagtgcggacggattcgaaaaatgggctgagggccgaaagctttcccggtagatgcggaatgcattttctcctcgctcgggattaatgaaatgcccaaatacatatccaatcccctgttgcgccgcgcgtcttgcgctgttttcaccaagaccgagcacccatagctcgggtgccgtgtcaataaggggcgccgctttgattccggcatacggatggtcgggaggaagggaatctgttagaaaataagagacatcctgcagctgtctgttaaattcggttaagctttttttcaccccgtccgttaatgcaagcctggtttttgtcgtgccgccgggggaacggccgacgccgaggtcaatccggtttggatacagggcctcaagctggcgaaaggtttcagccactttaaatgggctgtattggggcagaagcacgccgcctgatccgacacgaatggtgtttgtctgtgctgcgatgcgggcgatcatgatttcaggcgctgtgcttgccagtcctttcgtgctgtgatgctcggcaaaccaataacgcttatagccccactcttcactaaatcgagcaagctcaaccgaatgctgaagagttgtcacagggccctctcctttagaaacaggagcctgatcaagtatgcttaaatgaatcaaaaggccgcttcctttctgtctgtttttagatggtgacaccagaataggcaaaatgacttgcccgcgtcaaatggtttgtttaagaagcgcactttatagcatttgcaaatcatatatcaaatatggaagttttttttcgaggtttttcgtcaattattcttaacttttacgaaactttgatataataacaaacgtatatattagtaatttacggcttattttccttgtgagcgtaaaaataaatgtgactatcttcacattttgatgagtaggagtgaatcgtgtggcaatttctttagaaaaaggtcaacgaattgatttaacaaaaggaaaagccggtctgtcaaaattgatggtcggtctcggctgggacccagtgtcctcaggcggagggttcttcagcaaactgcttggcggaggcggtccgaatatcgactgtgacgcttcagtgctgatgttggaaaacggaaaattcaccgataagaaaaacctgatttatttcggcaacctgaaaagccgctgcggcggtgtacagcatacaggcgacaacctgacgggtgacggtgcgggcgatgacgagcaaattatgatagatttagataaagtgcctgcaaacatcgataagcttgtatttgtagtaaacatttacgattgtgtcagaagaaaacaagatttcggcatgattcaaaatgcgtttatccgcgtagttgatcaatctaatcacgaggaaatgctcaagtacaatttgagagacaattacgccggcagaacaagcctgattacagcagaaatctaccgcagcggcagtgagtggaagtttgcggcgatcggtgaaggcacgaacgatacgagattagaagatattatcagccgatacgtataaaagaaaaggagtggatgaaacatgacaatttcattggcaaaaggacaaaaagtagatttaacaaaaacaaatccgggtctttcaaaggttgttgtcggtttaggctgggatacgaacaagtatgacggcgggcacgactttgatcttgactcaagtgtgtttctgttagacgccgcaggcaaatgcgcgtcaccaaacgactttattttctacaaccagcttgaaggcggcaacggttcagtcgttcattcaggcgacaacctgactggtgctggcgaaggcgacgatgagaatgtaaaagtaaatctcagcgctgtaccggcaaacattgataaaatctcatttgttattaccattcacgatgcagaagcgcgcagccaaaactttggacaagtatcaaacgcgtttgtccgcatcgtaaatgaagaaacaaatgaagagctcatccgttacgatcttgcagaagatttctctattgaaacggcaatcattgcaggggagctttacagacataacggcgagtggaaattctcagcaatcggctcaggctaccaaggcggccttgcccgcattgcaacagactacggtttgcaagtcggttaagacaaatacgaagagcagaaaggagagaggcagtatggccattcaattatcaaaaggacagcgcattgatttaacaaaaacaaatccgggactgactaaagcggtgatcggcttaggctgggatacaaacaagtattccggcggacacgattttgacctggatgcttcggcctttttagttgatgcgcatgataactgcgtaaatgatctcgatttcgtcttctataataaccttgaacatccgagcggcggtgtcatccatacgggtgacaaccgcacgggtgagggcgacggagatgatgagcagattatcgttgatttctcgaaaatccctgctcacattgagaaaatcggcatcacagtgaccattcacgacgctgaagcacgcagccaaaactttggacaagtttccaatgcatttgtccgcgttgtggatgaagaaacgcagaatgagcttcttcgcttcgatttgggagaagacttctccattgaaacagctgttgtcgtttgtgagctttacagacacggcggcgagtggaaattcaatgcgatcggcagcggattttccggcgggctggctgcattgtgccggaattacggtttgcaagtgtaagcgagtgacaaatagagaagtcaccgtttcaaattaataggaggaaaaaacttggactttttacatcatattttgtctacgtatgcttcatttttcgattggaaaatgtggggggaagttctgactgatcctgtttcctggggtttgatcggttcccttgttgttctggaaggccttttatcggccgataacgcgcttgttcttgcggtcatggttaaacacctgccggaaaaacagcggaaaaaagcgttaacgtatggtttgtttggagcttatattttcaggtttattttcatcgggctcggtatgcttctcattaaattctggtggatcaaggtgcttggcgcgctttacctggcttggctcgtcattaagcacttctggattggcgaaaaagaagaggaagcggacggcatcaagaaaaactcttggatggtccgcacgttcgggatcttctgggcgactgtcatttcagtagaattaatggatcttgccttctctgtggacagcatcctagccgcgtttgcagtatctgaaaaagtatgggtgcttctgatcggcggtatgcttggtattttaatgatgcgtacagtggcaaaagtgttccttgtgctgattgataaaattcctgagctggaaaacacagcattcgtgttaatcggcattatcgcgctgaaaatggcggggagcgctttccattacgaaatgccgcactctgtattcttcattatcattatcgctgcatttgcggtaacattgatcattcactacatcaataaacaaaagcaggtgcgcgaacaaacagccgcttcaaaagaagaataaaacaaaacaaggagggaggttcaatgtccttccttttttgttaccgaaatatcgttcaatgacaaaccggaaaggaggatatgatgagacaagaagaactaaccattcataaagcacttccggctgatggcgattggaaaagcctgctgtttcagccattgccggagcgggatcactatgaaactgcacaaggcctttctttttctcgtcttgccggtcagatattgggcacgcctattgatgagacggactactataacgagctatatgagctgtctgtaaacgaccgcataacgattttgagtgaaacgcttgataaaacaatcgaaccggaaacatttcaaaagcttcagcatattcattccatcaatcagaaagaaaaagggctgtcagtcagccgctttgttgcctttctggacggggaaaagctgattgcgaagcactcaaatcccctgatgcaccgccatttaagaaaagcgctgatgacgcttttacatacctttgcggacagtcatgaaaaggggctgaatcatcctgattttcgcagagtgctgcttgatgtctcgaagttttccttaaaccatctgaacccttggctggaaaaaaccgatatagagcgggagatgccgaaggttgtttggtatggagatgcgacgaaaagccagctctatttcttatattatctgatgctggtcggctgtgatgtactgctgttccatccggcgggaacggatcagctggcgcttgtcgacccgaagcaggagctcggttttacggaaaagctcccggatgtttcggagcttcagccgttcccgaaagaaaaaccagaccggaaatcaacagtggcttaccgctcaacaaaggaaattgaacatgtgctgaatcacgaggaatccatgctgtataagccgtggcagttcagagatcacacaccggtgtccgttacgctgaaaacgacctatgatgaattgtttttaatcacgaaagaacgcgcctttattcggccgaatttcaaagctgataaacattcaattgagattccgaatgtattcgccaaaattatgggcgtgtcgaaagacaataaggaatattggaacaggcttcatactctagcggattatcaggaaacagaaatggtcagaagctttccatttacagaagaaataaagtcgaactatcaatttcactacagccacgcacttgatcaagaagggaacattgatccggacaagctgatggcaagcaatgtgtggcagtacaaacagctgccggcgggcgttcagactgccattgccaaaacgatttcgagaatgtgcaggcacccgcggcttaaagctttgcatcaggaacaagtcaaggatgttcaaatctatttgtttaaacaaacaacaaatctgcctgctaatctgctgaaattgattcaaatgttcgactatgcgcaaaccgttccgaaactcgttttatatcatacggaaatgagcggcggactcacgcgttcggatgctgctgccctgctgttcctgaatgaaattggaatcgatatcatcatttataatccgcccggacaccaagatattgagcagtttattgaagatgaccagtatgatatccactggctggatgacatggtgtttcagcaggactacaaagagccttcgcttgtgaaaaggctcttcagaaccattacccaaaaataaggagagaagaaaagcatgacaacagaaaatcaaaatccgcttgttctcgataaaaatgaagagatttcccagcaaaaagctgacgatatccgtcttcagcttcgtcaggaaccagaagtgaagcggcttgctcaacaaattgacgtcaaaaaccaaatggagctgcttgagtacggcaaggagccggccgttgaaatatccaagttctctgaccgcatcttagggatgatgaaaacaacaagcgtgacagactccggcacaatgctgactcagcttgggaaaatcatggaccgcttcgacaaaaatgattttgatgagccaaagggattaatggcgaaaattttcaaacgcggcggcagcatgattgaaaaaatctttaaaaagtatcagacgcttggcggagagattgaaaaaatccacgttgagatttcaaaatacaaagatgagatgacgaagacgaactacacgctcgatgaaatgtatgaaaacaatatcaaatactatatggagcttgaaaaatacgtcgttgccgggcagatgaaactggaagagatgcagtcgatccttccttcatatgaggaaaaagcggcaagcgggaaccagctggcgcaaatgcagctcgatacgttgcgcaacggcattcaggcgcttgaggaacgggtgtatgatctggatatggcacggatggtggcgcttcaaactgctcctcaaatccgtctcctgcagcgaggaaatgcaaagctgatcgggaaaatcaactccgcgtttatcattaccattccgattttcaaaaacggcattattcaggctgttacggtaaagcggcaaaagcttgtggctgattccatgagcgagcttgaccgccggacaaacgagatgctgaaacgaaatgctgaaaacatctcgagccaaagtgttgaaattgccagaatggccggcagaccgagcatagatattgaaacgatcgaatcgtcttggaacacgattgtcagcggcatgcaggaaacaaaacaaatcgaagaagaaaacaagcgcctccgcgaagacggcgcgagacgaattgcacagcttcaggataatattaaaaaagcagcattgcagcaataagaaaaaccccgcttgtggaacataagcggggtttttcaattacatcatttagttaatgacaatgtgtaaagacaggtgtaaacttaaacggtaatcattttgcatatcagaggtgttggcaatgggaaaacaacagcctatatcccagcgtaaactgctgggcgtcgccggtttggggtggctgtttgatgcaatggatgtcggaatattatcgtttattatcgccgcgctccatgtagagtggaatctgtcgcccgaggaaatgaaatggatcggaagcgtcaattccatcggcatggctgcgggtgcgtttttgtttggtttgcttgctgatcgaatcggccgcaaaaaagtgtttatcatcacccttttatgcttttccatcggaagcggcatttccgcttttgtgacgagcttatcggcatttctaatccttcgtttcgtgattggtatgggacttggcggcgagcttccagttgcttcaacactcgtttcggaagcggttgtgcctgaaaagcgaggcagagtgattgtgcttttggaaagcttttgggccgtgggctggctcgcagcggccttgatttcttactttgtgataccaagctttggctggcaggctgccctgctgttaactgcgctgactgctttttatgcgctgtacctgcggacgagtctgcctgattcgccgaaatatgaatcgctttctgccaaaaagaggtcggtgtgggagaatgtaaaaagcgtctgggcaagacagtatatacggccgaccgtgatgctgtcgatcgtttggttctgtgtggtgttttcttattacggcatgttcctatggctcccgagtgtcatgctgctgaaaggcttcagcatgattcaaagctttgaatatgtcctgctgatgacgcttgctcagctacctggctatttctctgccgcatggctgattgaaaaagcgggccggaagtggatactcgtcgtttacttgattggcacagcaggaagcgcctatttcttcggaacggcggattccttaagtcttctgcttacggctggaatgctgttatcgtttttcaatctcggtgcatggggcgtgctgtatgcttataccccggagcaatacccgactgcgattcgagcaacaggttcaggaacgacagcagcgtttggaagaatcggcggcatcttcgggcctttgcttgtcggaacgctcgcagcccgtcatatttcgttttcggtcatcttttcaatcttttgcattgcaatcttactcgcggttgcttgtattttgattatggggaaagaaacgaaacaaactgagctagaataggaaaagcacctcttgaatgaggtgctttcgcgtgtcgacaaaccctcgcattcgttgtcaggactgcgcttcggtgctcaatgcgaagtggatcaacggctaaattctcaggcgtcctgcctaaacgccgtcgtcatcacatcctgtgaatgtccgctcctatgctcgtccttcctagacttcaagggttttcaatcacgctgaaaaaatgacaaaattctaaaatgaaaaccattttagaattttgtcaacaatctgaggtacctctgaatgaggtgcttttttacaattgcgcccgggctgcggattggcgtttcccggttttactaattgtctggtagagcgtcatagaaagtatgaacagaatggcagtaaatcctgtgacagctccgaaatgctgtgtgctttgatataaaaaacctgcaatacttgtaccgacagtggttccggcatacatagcggcattggaaagggaagcaatggttcctcgcgcatttggtgcaatggattgaaagacacccatcattaacggaaagatgatgccagctgtaaagaacgtgagaaaaaagccggcttctactaaaaacaagtttggaaagaacggaagagcgaaatagagagcgcccattagcagcatcccgctgatcagtgttttaaacatgcccagcttttctgaaacccggctgccgataaggctcccgagcatatttcccagtccgagtacaagcatagctgcgccaatttgtgacacggttaaatgataatccgcggaaagccaagtacccagaaagctgaacgatgcgaagtttccggtttgaaacagaaaataggcaagcagaatgaccgatgttttcggcaatgaaaaaagctcccgataggggttgacaattgatgggcgcgccaatggttcagaaggccggatgccaggcatgaccgccgccaggatcaatagaagaataagcgagcacgctgacaaaacgaaaaatggcgtatgccatgtaaaggaagcgagaaaccctccaataggaagtccgagcatttgtgaagcggccaaacctgctgtcgcaatccccatgccttttatgatctgagaaggctggacaatgactgggatggacgcccaaatttgaggcgtcacaaacgcagcgctaacgcctgcggcaaaacggaacaggcacatggcggcaaaagagggagcgatgccgcataaaaacgtggatacaataaagcctgcaagtccccacagcatgactgttttcctgttcagccggtctgagattgggcctgcaatgaaagcgaagagcgcataaccgagtgcataagcactgaccatccagcctgacaaatcagtagagacatgaaactgatcctgtaaaagggggagaagcggcgaaagcaaaaaggtatccgtgccaatgacaaacatgacactgaagaaaagccaaatgcgattcaaatttatcactcctattgttttataactttgaaactatgaaacagatatgtatagagaaaaccctttgttagagggtttccaaaaagccaggcaggtatgtttgaaatgtgtcttcacgcagactgacgtattttgtccgcgaatctttccgggttgccgtcaatcccgcttcacgcagcgttttaaaatgataagatgccgtggttttgacaatattgcacttttcacctacttcaccgcagctgagttcttttccgctgacataaagcgtacgaataatggcaagccttgattcatcagacagtgctttaaaaatttgcgctctgatttgatcatctgattgtttcatagtcatgaaactataatacataatgggtgttgaaaaagcaacttatttttccagtaaaggagcaggaagtcataagaggaaggaggaattcaattccaataaaagcgttttcaactaaagataggcgaaaaatcacccgtaaaatacaatcatataggaggattacagagcatttagaagcataaataagatcatgtggtcacatggatgtttataaagaaatggtacagaataaaagagaatatgctgtttgtgtaggaagttacataaatgttacggtaataaagattgcttaatatggagggaaaatatgagtgtagatgagaaaccaattaagataaaagtcgagaaagtctctaagatttttgggaaacaaacaaagaaggcagttcaaatgcttgccaacggaaagacaaaaaaagagatcctgaaagcaaccggatcaaccgttggggttaatcaggcagattttgaagtatatgatggtgagatatttgtcatcatgggtctatcagggagcggtaaatcaactttagtacggatgttaaaccggcttattgaaccgactgccggaagtatttacattgatggtgacatgataacaaatatgtcaaaagaccagctccgggaagtccgccggaagaaaatcagcatggtcttccaaaagttcgctctgttcccgcacagaacgatacttgaaaacacagaatacggactggagcttcaaggtgtagacaaacaagagcggcagcaaaaagcgcttgagtctcttaagctcgttggactggaaggatttgaacaccaatatcccgaccagctttccggcgggatgcagcagcgtgtcggccttgcccgcgcgttgacaaatgatccggacatccttctgatggacgaagcgttcagtgcgcttgatccactgattcgtaaagatatgcaggatgagcttcttgatcttcacgataatgtcggaaaaacaattatctttattacgcatgacttggacgaagcgttgcggatcggcgacagaattgtcctaatgaaggacggcaacatcgttcaaatcggcacgcctgaagaaatcctgatgaatccatctaacgaatatgttgagaaattcgtcgaagatgttgatttgtctaaagtcctcacagcaggccacattatgaaacgcgctgaaacagtgcggattgataaagggcctcgcgtagcattgacactgatgaaaaaccttggaatttcttcaatttatgcagtggataaacaaaagaaattattaggtgttatctatgcgtctgatgctaaaaaagcggctgagtctgatttgtcacttcaagacatcttgaatacagaatttacaactgtaccagagaatacgtatctgactgagatttttgacgttgtgtccgatgcgaatattccaattgcggttgtggatgagaagcaaagaatgaaaggaattgtcgtaagaggcgcgctgattggcgcacttgccggcaataacgagtatatcaatgctgaaggcactaacgaacaaacacaagatccttctgcacaggaggtgaaataagatggatagactgcctagaatacctttagcagatattattgaccgttttgttgactggattacgatgacgtttggcggattcttcgacggaatcgctaacggattggccgcttttgtaaatggaattgtcaccggtcttggatttattccatctattttgttaacgattattttcgccgcacttgcgtggtggatcagtacaaggggaattgcgttatttacgttgattggattcctcctgatcgattatttaggatattgggacccaatgctgcaaacattggcgcttgttttgacatctgtgattatttcgattgtggtcggggttccgatcggaatttgggcgtctcagaaagaaacggttcgccgtattgtaacgccaattcttgatttaatgcagacaatgcctgctttcgtatatctattgccggcgattttcttctttaacatcggtgttgtgccgggtgttgttgcatctgttatcttcgcgatgccgccgacaatccgcatgactgttctcggtattaaacaagtgccggcggatttgattgaagcgactgaggcattcggttctacaacagttcagcgtttgtttaaagttcagcttccgcttgcgacaaaaacgattttggccgggatcaaccagagcatcatgcttgcattatcaatggttgttatcgccgcaatggtcggtgcaccgggacttggttctgaagtatacagtgccgttacacagctgaaaaccggggtcggagtagaggccggtatcgccatcgttatcgttgccattaccctggaccgtattactcaaaatattaaagtgaagaagaaaagcagggggaatgcctgatgcttaaaaaaatcatcggcatcggcgtttccgccatgctggcgctctcacttgcggcttgcgattcagaaaacgatgaaaatgcatccgcagcagaacaggtgaataagaccatcatcgggattgaccccggttcagggattatgtccctgactgacaaagcgatgaaggattatgacctgaatgactggacattgatttcagcgtcaagtgctgcgatgaccgctacgcttaaaaagtcatacgaccgtaagaaaccgattatcattacaggatggactccgcactggatgttctccagatataagctgaaatatctcgatgatccgaaacaatcttatggcagcgcagaggaaatccatacgatcacacgcaaaggcttcagcaaagagcagccgaatgccgcaaagcttctgagccagtttaaatggacgcaagacgaaatgggcgaaatcatgatcaaggtggaagaaggcgagaaacctgccaaagttgctgctgagtacgtcaataaacacaaggatcagattgccgaatggacaaaaggcgttcaaaaggtgaagggagacaaaatcaaccttgcctatgtggcgtgggacagtgagattgcaagtacaaacgtcataggcaaagtcttagaagacttgggctatgaggtaacacttactcaggtagaggctgggccgatgtggactgcaattgcgacgggaagtgcggatgcatcactttccgcatggctgccgaatacccataaagcatacgccgctaaatataaaggcaaatatgacgatattggcaccagtatgactggtgtgaagatggggcttgttgttcctcaatatatgaaaaatgtcaactcaattgaagatttgaagaagtaatcaaaaaagcagcctgtgtcaggctgctttttttgcgttattttacgtaagcggcagcgggtgaatcagccttttgaaaagtttttaatacggcattcgctaaaatatgaatgccggtaaacatcgcgtttcggtcaaaggtcatgtgcggatgatggagccccggctggagcccgcagcctagtccgagcatcgttgttttcagattcggcaccttcacggcgtaaaaatggaaatcctctccgccggtagtgacaagcgggtcatcaagccgctcagccccgatgatatctgtaatggcttctgccatgatcgcttcagcttctttgttttgtgttgccgcaggaaggctgtgttctttttgcagctcgatttttgcgccgaatgcagcggcggccgcttcacaggctctttctgtctcggcgattaacgcctccatggcttcattggtctgtgcgcgcaaatcaaggctgaacgatgcttttcctggaatgatgttagagctttcaccgccggcttgaagttttgtcattttgacggtatgcgggatttgcgggtcaatatgaatgagtccgagcttatgtacaagaaatgccgcaatttcaatgctgttttttccgagatgcggacgggcgccatgagcctcttccccgatgatcgttccctcaatgtgctggcttgatccgtgcagaatagacggagcgcagcggccgttctgtgtttcctgaatcgggcggacgtgaacgccatacaaatagtcgatatcatcaagcacgccttcttctatcattttcaaggcgccgccgcctttttcttctgccggctgaaagataaaacggattgtgcccttcggaagctcaggttgtttttttagcagcattaatgtgcccaatgccattgtcatatgtgaatcgtgtccgcaggaatggttggcgcgaaatgtgccgttaacctcctgccacagcgcgtcaatatcagcgcgtaccgctacaacaggtgagcctgagccgatttcgccgacaaccccggtgcagtctgaaaacgtgcgcgtccggcaccctaaatcctcaagcttttgtttcaaaaatgaagttgtctcatattccttccagctgacttcagggttcgcgtgcagatgctcgaagatgtccataatggtttgtttcatgtcttctgaaagcttttgcatggtaagaaatacctccttctatcagaatgaatttttaccttctttactttatttatattgaaacaggaagataggctgtatataatatagcacatattgctactattcagaataattaatattttcaaacagaggggatggatcgaaatatgagtatgccagcagccgaaacacagcctaagaaaaaacgaatgacatttaaaatgcctgacgcttatgtcctcttatttatgattgctttcatttgcgcaatcgcttcatatattgtgccggcaggtgaatttgaccgcgtgacaaagggggatgtcacgaccgctgttccgggaagctatcattccattgaacagtctccggtcagcttgatcagcttttttacttctctacaggatggaatggttggatcagcacccatcatctttctgattctattcacaggcggcaccattgctattctagaaaaaacgggtgccatcaatggcctgatttacaatgtcatcagcaaattccgcacaaagcaattattatttatttgtattgtcggcgcattgttctccattctcggaacaaccgggattgtcgtgaattcagttatcggttttatccccatcggcctcattgtggcacgatccttaaaatgggacgcagtcgcgggagccgctgttatatacatcggctgctacgctggatttaactccaccatattatcaccgtcaccgctcggtttatcacaatcaatcgcggagctccctcttttctcaggaatcggcctgcgagttgtgatatacatatgctttttgctgtcttctattatttatatctatttgtatacgagaaaattaaaaaaatcaaaagatgccagtgtgttaggaacagattggttccctgcggcaggaatgggcgaagccggtaaagaagaagatcagtcagtgccgtttaccgttcgccataagctgattttggctgtggcgggactctcacttgtcggatttttatacggcgctttgaagcttggctggtcagattcccaaatggctgcgacatttatttttatttctgtccttgccggtttaataggcgggcttgcggcgaacgatattgccaaaaccttcattacgggctgccaaagtcttgtatacggggcgctgattgtcgggatggcacgaagcatttccgttatccttgaaaatggaaagcttctcgatactgtcgtcaatgctttggcttcacttttggatggattcagcccgattgccggggcaatcggcatgtatatcgccagtgcgctgcttcattttctcatctcttcaggttctggcgaagccgttgtatttattccaatactggcgccgctcgctgatttgatgggaatcacgagacaggttgcggtggaggcagttatgcttggagaaggggtcgtcaactgtgtgaacccgacatccggcgttctcatggcggtgcttgccgccagcggtattccgtatgtcaagtggctgcggtttatggtgccgcttgctctgatttggttcttgatcgggcttgtctttatcgtgatcggcgtcatgatcaattgggggccgttttaacgattgctgcccgccggcttgtacggcgggcttttgagttattcattgcagaagcgcaggctgttattgtaacatgtaagccataagccattcgtaaaagtgcgggaggaaggtcatgaataatctgcgtaatagactttcaggcgtgaatgggaaaaataagagagtaaaagaaaaagaacaaaaaatctggtcggagattgggatgatagcgggagcatttgcgctgcttgatgtgatcatccgcggcattatgtttgaatttccgtttaaagaatgggctgcaagccttgtgtttttgttcatcattatcttatattactgcatcagggctgcggcatctggaatgctcatgccgagaatagacaccaaagaagaactgcaaaaacgggtgaagcagcagcgaatagaatcaattgcggtcgcctttgcggtagtggtgcttacgatgtacgacagggggattccccatacattcttcgcttggctgaaaatgattcttctttttatcgtctgcggcggcgttctgtttctgcttcggtatgtgattgtgaagctggcttacagaagagcggtaaaagaagaaataaaaaagaaatcatcttgaaaaatagatggtttctttttttgtttggaaagcgagggaagcgttcacagtttcgggcagctttttttataggaacattgatttgtattcactctgccaagttgttttgatagagtgattgtgataatttaaaatgtaagcgttaacaaaattctccagtcttcacatcaggttgaaaggaggaagcggaagaatgaagtaagagggatttttgactccgaagtaagtcttcaaaaaatcaaataaggagtgtcaagaatgtttgcaaaacgattcaaaacctctttactgccgttattcgctggatttttattgctgtttcatttggttctggcaggaccggcggctgcgagtgcagaaacggcgaacaaatcgaatgagctaacagcaccgtcgatcaaaagcggaaccattcttcatgcatggaattggtcgttcaatacgttaaaacataatatgaaggatattcatgatgcaggatatacagccattcagacatctccgattaaccaagtaaaggaagggaaccaaggaaataaaagcatgtcgaactggtactggctctatcagccgacatcgtaccaaattggcaaccgttacttaggaactgaacaagaatttaaagaaatgtgtgcagccgctgaagaatatggcataaaggtcattgttgacgcggtcatcaatcataccaccagtgattatgccgcgatttccaatgaggttaagagtattccaaactggacacatggaaacacacaaattaaaaactggtctgatcgatgggatgtcacgcagaattcattgctcgggctgtatgactggaatacacaaaatacacaagtacagtcctatctgaaacggttcttagaaagggctttgaatgacggggcagacggttttcgatttgatgccgccaaacatatagagcttccggatgatgggagttacggcagtcaattttggccgaatatcacaaatacatctgcagagttccaatacggagaaatcctgcaggatagtgcctccagagatgctgcatatgcgaattatatggatgtgacagcgtctaactatgggcattccataaggtccgctttaaagaatcgcaatctgggcgtgtcgaatatctcccactatgcatctgatgtgtctgcggacaagctagtgacatgggtagagtcgcatgatacgtatgccaatgatgatgaagagtcgacatggatgagcgatgatgatatccgtttaggctgggcggtgatagcttctcgttcaggcagtacgcctcttttcttttccagacctgagggaggcggaaatggtgtgagattcccggggaaaagccaaataggtgatcgcgggagtgctttatttgaagatcaggctatcacagcggtcaatagatttcacaatgtgatggctggacagcctgaggagctctcgaatccaaatggaaacaaccagatatttatgaatcagcgcggctcacatggcgttgtgctggcaaatgcaggttcatcctctgtttctatcaatacgccaacaaaattgcctgatggcagatatgacaataaagctggggcaggttcatttcaagtgaatgatggtaaactgacaggcacgatcaatgccaggtctgtggctgtgctttatcctgatgatattgcaaaagcgcctcatgttttccttgagaattacaaaacaggtgtaacacattctttcaatgatcaactgacgattaccttgcgtgcagatgcgaatacaacaaaagccgtttatcaaatcaataatggaccagagacagcgtttaaggatggagatcaattcacaatcggaaaaggagatccatttggcaaaacatacaccatcatgttaaaaggaacgaacagtgatggtgtaacgaggaccgaggaatacagctttgttaaaagagatccagcttcggccaaaaccatcggctatcaaaatccgaatcattggagccaggtaaatgcttatatctataaacatgatgggggcggggcaattgaattgaccggatcttggcctggaaaaccaatgactaaaaatgcagacggaatttacacgctgacgctacctgcggatacggatacaaccaacgccaaagtgatttttaataatggcagcgcccaagtgcctggccagaatcagcctggctttgattacgtgcaaaatggtttatataatgacgcgggcttaagcggttctcttcctcattgagggcaatgctagaggggacttaccgaaagaaaccatcatagatggtttcttttttgttcataaatcagacaaaacttttctcttgcaaaagtttgtgaagtgttgcacaatataaatgtgaaatacttcacaaacaaaaagacatcaaagagaaacataccctggaaggatgattaatgatgaacaaacatgtaaataaagtagctttaatcggagcgggttttgttggaagcagttatgcatttgcgttaattaaccaagggatcacagatgagcttgtggtcattgatgtaaataaagaaaaagcaatgggcgatgtgatggatttaaaccacggaaaggcgtttgcgccacaaccggtcaaaacatcttacggaacatatgaagactgcaaggatgctgatattgtctgcatttgcgccggagcaaaccaaaaacctggtgagacacgccttgaattagtagaaaagaacttgaagattttcaaaggcatcgttagtgaagtcatggcgagcggatttgacggtattttcttaatcgcgacaaatccggttgatatcctgacttacgcaacatggaaattcagcggcctgccaaaagagcgggtgatcggaagcggcacaacactagattctgcgagattccgtttcatgctgagcgaatactttggcgcagcgcctcaaaacgtgcacgcgcatattatcggagagcacggcgacacagagcttcctgtttggagccacgcgaatgtcggcggtgtgccggtcagtgaactcgttgagaaaaacgatgcgtacaaacaagaggagctggaccaaattgtagatgatgtgaaaaacgcagcttaccatatcattgagaaaaaaggcgcgacttattatggggttgcgatgagtcttgctcgcattacaaaagccattcttcataatgaaaacagcatattaactgtcagcacatatttggacgggcaatacggtgcagatgacgtgtacatcggtgtgccggctgtcgtgaaccgcggagggatcgcaggtatcactgagctgaacttaaatgagaaagaaaaagaacagttccttcacagcgccggcgtccttaaaaacattttaaaacctcattttgcagaacaaaaagtcaactaaccgcaactttagagtaaagggctgattgtcaatgtgggagcagttgtatgatccgtttggaaacgagtatgtgagcgcacttgtggcgctcactccgattctcttttttcttttggctttaactgttttgaaaatgaaaggcattcttgcggcatttcttaccctagccgtcagtttcttcgtctccgttttggcatttcatatgccggttgaaaaagcgatttcttctgttttgttaggaatcgggagtgggctgtggcctattggctacatcgtcctgatggcggtgtggctgtataaaatcgcagtgaaaaccgggaaatttaccattattcggtccagcattgccggcatttcgcctgaccaacgattacagctattattaattggtttttgttttaacgcgtttttagaaggcgcggccggttttggtgttccgattgcgattagtgcggcgctgctcgtcgaacttggttttaaaccgttaaaagcggcagcgctctgcttgattgcaaacgcagcctccggagcctttggggcgatcggaattcctgtcatcacaggggcgcagattggtgatttgtctgctcttgagctgtcacggacattaatgtggacactgccgatgatctcatttttaataccattcctgcttgtattcttattagaccgaatgaaaggaatcaaacagacatggcccgctcttctggttgtgagcggtgggtatacagcggttcagacactgacaatggcggtgctcgggccggaattagcaaacattttggctgccttattcagcatgggcgggcttgccctcttcctccgcaaatggcagccgaaagagatttaccgcgaggaaggggccggcgatgctggtgagaaaaaggcataccgtgccgctgacattgcgaaagcgtggtctcctttctacattttaactgcggcgatcaccatctggagccttcctgccttcaaagcgcttttccaagaaggcgggctgttatatcaatcaacgctcctgttcaaaatgccttttctgcatcagcaaattatgaaaatgccgccgattgcgccatctgccatgccgttagatgcagtctttaaagttgatctgctgtcagcgactggtacagcgattttagcggcggtcatcgtgacagggctgttcagcaaaaagttctcctcccgggatgcctttgcttccctgaaggagacaggaaaagagctgtgggtgccgattatgacgatctgcttcgtgatggggtttgccaatctggccaacttcgcagggctcagctcttcaattggattagcattggcgaaaacaggagacctgttcccgtttgtcagtcctgttcttggctggattggcgtgttcattactggttctgttgtcagcaataatgctttgttcggtcatttgcaggttgtcaccggagcgcagatcggtgcgggttcagacttgctgttagccgcaaatacggcgggcggtgtcatggcgaaacttgtttctcctcaatctatcgccatcgctgccgcagcggtcggccaaacaggcaaggaatctaaactgtttaaaaagacagtggcgtacagcctgattctgttagtgattatttgtatatggacgtttattcttgcaagatttggagtgtaatagaaaagagcagtacatgcccagcatgtactgcttttttatgttaatttgctttctttgtcatttcggctgttgttttcactctggctttccccataaataaaatggtaaccgccgcgaggacaattggaatcaaagcgagcaaaaacacatacgtaatacttgatgacatcgcgtcaataatgcgattcaggatcgcatcaggaatctgggaacgtgttccagcttggaatatctcctgcgggtcgccaatattttgcgcagcacctgatcccgctgagcctttcatcccgctgaaggcgtcggtcagcttgttcgtgaatacgtttgtttgcaccgttccgaaaatggtgacgcctaaggtcatgccaaatgatcgcaaaaatgaatttgtagagtttgccgttccccgaaagcgaggttcaagatcattcatcgatgccgccggcagcagggagaagttaaagcctacaccaaagcctgaaatcatcataaagactgtcagccatacccgtgctgtgtcaggcgtcatattggaaagaagcagcatgccgataaagaaagctataacagatatcagcatcaaattgcggaagcttgccttcgtttggaagatcccgccgatcatgcttccgatgactgatccaatcatcatcggcgtcagaatgaagcccgcgcttgtcgccgagctgccgtagaccgcctgaacgaaaatcggaataaataccgctaaaataataaatgttccgccatacaggaaagcgagaatctgtgctgtggcaaacaagcggttcttaaacatccagaaagaaataatcggctcttctgcttttctctccacaataaaaaaggcaatgaagaaaacggcgaatacaataaacagcccgatgatctgaatggaattccaatcgtatgttttgccgccaagctcaagggcgaacatcaggcatacaatggatacgactaaggtaatcgcgccgccccagtctattttctgctttctgtgctccagagattctttgtagtagcgaataatgaaaaacaatgacaatgcgccgatcggcacattgatgtaaaacacccagtgccagctgatcgaatctgtaatgatcgcgcctaagagcggaccaagaacactggataatccaaatacagcaccgaacatgccggacatttttccgcgtttttccggcggaaacaaatcaaagataatggtaaaggcaatcggcaggagcgcgccgcctccgatcccttgaatggcccggaagatgatcagctgattcatcgtctgggcaatcccgcataaagcagaaccgattaagaaaaaaataagtccaaacaggaaaaaacgttttcggccgtacatatcggaaagcttgccgtaaatcggcatgccagccataaccgccaccatataggatgccgtcacccatgcaaatttatcgaaacttccaagatcggctacgatattgcccatcgcggtggcaacaatcgtattgtccattgcagacatcaagatgcccagcaggagaccgaggaccacaaatttggtggaagcctgttttgctgttgttgtgtccatttgttctacctcctcttacttttctatgtaagttctgatatcatgataatagtttgattgttgaatatctcgattatcaagataaactcgattttatagggaggactgtcagttgtcaacaagaaattccagaagtgagttggaaaagactgctgttcagctttttcgaaaactgggcacaagaacggttctgtttcatcaggcagccgctcaagctctcggtctgtttcccaccgatttgaaatcagctgacattttaaatgaagcagggccgatgacggccggagaactgggaaaaaaaaccggcctcagcacggggtcagtcacggcgcttgttgaccggctggaaaaagcggggtatgtggctcgtgaaaaggacccgaatgatcgcaggagagtcgtaatcgtccctttgactgcttcgaaaaaacatataaaggatttgttccgtcctctgtctgagtcaacgatggatttgtgccgcgaatatacggaagaggagctggaactcattttcagttttgtaggcaaagccgccgatattatggaggaagagcttgaacgtctgaaacagtaagtgaatttgtgcatagcttggcccgttcccgaataaattgtacaagttacataagagaagggagtacgggccggtgaacatttttttgagctatattgtgctgggactgtccttgtctgcgcctgtggggccagtgaatgcggcgcaaatagacaaaggaattaaaaacggtttttggcatgcatggattttcggtttaggcgccatgacagcggatgggctgtacatgctttttatctatttcgggctgtcacagtttttgaccgctccatttgtgaaaacgtttttgtggctcttcggcttttttgtcctgacctataccggaattgaaacgcttaaaaacgtcagagaaccgatggatgtgcgaagctcgcgggggaaaccgtcatacaggaaaacattcgcatcgggttttctcatttcattgtcaaacccattgagcatccttttttggcttggaatttacggaagcattcttgcgaaaacagcagaggcctacaatatgaatcagcttctaatctatagctccggcatcatgatcggcattttaatctgggatttctgcatggctatcacagccagtacgttcagaaacctgcttcatgaaaagctattgagaggattgaccggaatcgccggtgtatccctccttgtgtttggcttttactttggttatcagggcatcaaacagttattgggctgattcatgaaggacagtcacctgccgcttccagttttaatatagtatccagatgatactggaggtggatcaatggtgaatgggatttacaccaaaagttttctggaacgtattcaggaagagcttcctgaatggcaaagaatcgcttttgagctgctggcagaaactctgggggacgacgcggatacgtttccgtgcattcccggacgccaggcgtttctgactgatcagcttcggattgcttttgccggagatccgcgggaaaaccgcacagcggaggaactggctccgttgcttgcggagtacggcaagatatcgcgggacacgggaaaatacgcatccctcgttgtgttgtttgatacaccggaagatttggcggagcattattcgattgaagcgtatgaagagctgttttggcgctttttaaatagactgagtcatcaagacgaaaaagaatggccggaagacattccggccgatcccgagcattataaatgggagttttgttttgacggcgagccgtactttcttctctgcgctacaccggcgcacgaggcgagaaaaagccgaagctttcctttttttatgatcacgtttcagccaaggtgggtgtttgaggacctaaatggatcaactgcatttggccgtaacatgagcaggctgatccgatctcgtttagaggcctatgatcaggctccgattcacccgcaattaggctggtacggaggaaaagataatcgtgaatggaagcagtatttcctccgtgatgacgaaaaacaggtatcgaagtgcccgttttcttatttaaagaacatgttcaacaaaatgaaataaatcaaggactggcagggcgatctttatgaccctgctttttttgatagatcatggtaacgatggcgatgatcacgagaaaacctatgctgacgaaaaaaccgggccggcttgatttttcaaacaatgtaccggacacagccgcagcaatcagaaccatcgctaaataaatttgcgtttttcccatgccctcgggatcagtcagctttttgctggagaacaggataaacagccaagtgtataaaagcataagccccgcagctgttgtcatatgctcataaatgtttttaggcagcactaacgacagaataatggagagaacaagccccgcaaacgtcagcccaagtgccggccagcatatttttttgccttcctttagagtaaagcatttcggcgcgtcgccgtcatcagccatcgtacaaagcaatgtcgtaaccgcaaatagcgaagcgacaagggtcgagaacccggcgataatgaaaatcccgttaaatatatcaaggatgatctcaaggttgtatccttttaacgacgtaatgaacgggctgtcctgttctgtaaacttgtgtaacggaaccaaaagcagagccagcccgattgaaatgatataaataatcgccagcgttgccagcatcagtttccctgatttagacgcttcctcaggtttttttaagtgaaccgccatcagccccatgacctcaatcccgccaaaagcgtaaaacgcgtagattaaacctgtccacagccccatggcgccgtatgggaaaaactcactcgtcttatttggaacatgtatgccatgatttccgccggacaggataccgcataaagccaggatggcaatgacaataaacataaaaatagcagctgttttaatgactgccagcacgttttctgttttttcaaagacggacaggccggtgaaaataataaggagccccagtactgcatagattgaggcaaacacccatagcggcacttgaggaaaccaatgcttcgtaaatagcgaaatggctgtcagctggcttccggtaatcagcatttctgatgtccagtacacccagccgttgctgaagcctgcccatttgccgaatgcttttcgggcatacgcacaaaacgagcctttttccggctgcttcgccgatagcttggcgagctgttcaaagacaaaatacgtaccgatccctgcgatcagaaatgaaaggagaacggaaaaaccgctttttacaattgcgatgctggaaccgagaaagaagcctgttccaatcgtgcagccgactccgatcagtgacagctgccaccaagccagattcccttttggctggtctttttttgtttggctcattatttattcaaccccttttatctaaggttagattgtgatctgtccaaagcttatatacatcggatttttgcctctttttacatggagaaggaagcggacgctcatactaatgaaaaaaggagcaaaccaatgacacagcaatatattgtggagccgaaaaaagggcttgggctgaagctgaaaaagggtcagattttaaaggtggttgatgtagaagggcagcaggtggctgattttgtcgcataccatgccaaggatttttatgaacaccttgatcagggagcgacgatagacgccaatcactccattcatgtgaaggtcaacgaccatctctactccaacctgtataagccgatgttaaccctgattgaagatacggtcggcaagcatgatctgctgttgcccgcctgccgtcctgatatgaacaggctcttatatgggaagcaaaaggatgagtttcaggatacgtgctatgacaatatgaaccgtgcgcttgagcagtttggcgtaccgaagcctcacatgcattacccatttgcgatttttatgaatactgtccttgatgagaaagggaatctgtctgtggaaacgccgctttcgaatgccggagattatgtaaggctcagggcggagatggatttaattgtcgcgttttcttcctgcccgattgaaaaagggaaatgcaatggcgacagtgtgacatccatacgggttgaagtcagctgatctctcttgttcactgtgaatgaagacctgtgctatatttaatagggatacataacagtcatgattcattttcattgatttggggaaatgatcagtaacaagggaaaatgtacaggaggaatgattgggatgagcatgcaggaaaagattatgcgtgagttacatgtgaagccctcaattgatccaaagcaagaaattgaggaccgagtcaattttttaaaacaatatgtaaagaaaaccggtgctaaaggctttgtattgggaatcagcggcggccaggattcaacacttgcgggaagactcgctcagcttgcggtggagagcattcgcgaggagggcggagacgctcaatttatcgctgtccgtcttccgcatggcacacagcaggatgaagacgatgcccagcttgctttgaagtttattaagccggataaatcatggaagtttgatattaaatcgacagtcagcgctttttctgatcagtatcagcaggaaacaggcgatcagctgactgactttaataaaggaaacgtaaaagcaagaacaagaatgatcgcgcaatacgcgatcggcggccaggaaggccttcttgtgttaggaacagaccatgctgctgaagcagtgactggtttctttacgaagtacggtgacggcggagcagacctcctgccgctgacaggcttgacgaagcgccagggaagaaccttgctgaaagagctgggtgcaccggaacgcttatacttaaaagaaccgactgccgatctgctcgacgaaaaaccgcagcagtcggatgaaacagagcttggcatttcctacgacgagattgacgattatctcgaaggaaaagaagtatcagcgaaagtatcagaagcgctggaaaaacgctacagcatgactgaacataaacgccaggttccggcgtctatgtttgatgactggtggaaataagttgaagaaagcccgctctcggagcgggcttttgtcgtgtacagaagctttatttgatgcggatatgattcagcttgaccattaatctgtcggcgaaccttcggaggctgcctctcgtatcaggatctaatgggagttcggctctcgcggcaatgttctctgccacatcctgaatcgacaggttgtctgtttgaatgtggtcctcaaaaatgggtgatgataaaccttcaatgcagcggtcaatttgtttggcggcccaggagttttttccttctgctctggtgcgcagcctttttaacaaggtttcctttgaagccattagtgtaaagtggtgaacgatcctgccttcatgcctgagcctgccgatgatctcattgaagtattcaggatgtacaatcgtcataggcacaataatgatgccgcggtatgtatctgtcagagaagctagaaaactgtaattgaacgcccgccataagggatagctttgaaaatcgtcctttgcgatctcctgcggcaccatggagcgcagcgcaaaacccattttctcgggatcatacacgtaagatgggtttagccttctgtgcagttcgaaggctgtttgtgtttttccggaaccgaatgccccgtttatccaaatgatcatcgccatttctcccttcctattcatcatacagaaaaagacccttcaatcgaagagtcagctggaaaaacaataaaggcggaaggttttaacgcttttttgcgtcgaagtattaaaatacctgcagaaatgttgtacaatgaatgtcattcaggcaaaaatggctaaacaacaaagcgcactttaagcttggaccggtaaagccggtatctatataaatattcgttaaataagcatataatgaagataaaatttcattccttaggaggatttcgccgaagatgaacgctaaacgagccatcccagtaagagaaagaaatatcgtcctgatcggattcatgggtgtaggaaaaacaacaatcggccaattggtcgctaaaaaattatatagagattttattgatattgaccaagagatcgaaaaggatttcaatatgacaattcctgagatatttgagaaaaagggagaagactttttccggaaaacggagaaggaatatattttagacatctgccatcataaacgattcaaagtcgtatctctgggcgggggatcttttaaacaagaagaaatcaggaattgctgtctggaaaactgtctcgtgcttcatctggacctgtcatgggagaactggaagcagcgcgcggatttattgatcgaaagccgccctgtactgcataaccgttcaatggatgaaatggaacagctgtttaacgaaagaaaagtcatttatgacaagcacaattcaaaagtggcaacagacaacctttccccggaagaggttgccgattacattgttgagacattaaaaattggctgggatctttatcagccgatgtaaaaagccgtgcgcagcgcacggctttttttatcgttttatcccttgtatcaaaatcgcttttaaacaaaaggagatgggctgtccgttttggttcaatgtaatacagaacgtgtcgcgtgcttcgtctgatgcgtgattcaagtgggtaatgatttgtttttctcggtcagcgggggttccgcctcgtttgatccagctatcgtattgaatcggcaagttccacttttggatgtcttgataggccagttgattggcgctgaacatcgactgccattctgataatgagctttctcgaacatgggaagggtctcgaagccggttcaaatgattgacaaactcatcaagaatgggatcttcaggcgcgtaatgatcaactaagagaaaacgtccgtcctcttttagtacgcgtgcaacctcgctgacagctttgcggacatctgaaaaatggtgggctgcgtatcggcaggtgatgatgtcaaatgaatcgtcggggaaggggagtgactctgccgttccttgctgaaagcgtacgttttcagctcctttttcttgcgcgaaggaggacgcaacctcaaccatctctttcgtcgcatcaacaccgatgcactcctgtacataaggagaaaatgccagggccgtatggccggcgcccgctccgatatccagcacccgatgctctgcccggcattccgctgttttgatcatcaaccccaaatcttccccctcggcaaataccttttcatcccgatacatctcggcgtttttagaaaacggtgtttcattagtcatttgaaccagctccttcttttcgtaaatgatgatatggattatgttagcaatttctgttatgattcgtccaagatataaaaatgatgaaaacgataggttcaacctatggaggctgaaatggatattaaagtgatggaatatgcagcggaaattgcccagcgccaaagctttacaaaggcggcggaacatcttcatatcgcacagccgtctctcagccagcaaatcaaaaagcttgaggctgagctagggcttaccctttttcacagatcccatggctctgttacattgacaccccacggcaggcgtttcattgaaaaagccgaggacatcattcgttccagagatgatttgcttcgggaaatgcaggagcgatcacagggaatcggtcataaattatccatcgggattcctgctgtaacagggagatatctctttcctccgctgctgaagcagtttttggcgcgctatcctcatgtggaggttcagcttgttgaaaaagattcggtttcattagaggagatgacggcaaagggagaagttgacctttctgttttatccttgcccatcgaggatgaacggctctccattatacccttgctcacggaaccagttgttctcgcagtgccgaaggaaaaacaaaggtggatgccgccggaaatggtcgcgctgattgagaaagcgctggaagaagatgagggacaccagccgtgtgtgccgcttgacatggtaaggaacgtgccatttattctgttaaaagaaggcttcggctttcgcaggacagttctcgatctctgtgcggaaagcggctttaagccgaatgctgcctttaagacaagccatattgaaaccgcccaatctcttgtggctaacggattaggtgtgacaatggcaccgaatatggtcagaagggataaagatccgggtgtgatctatttattgattcaatccgcgccatcacgaaccctcgtcttcgtctttttaaagaaccgctatgtcagtctgaccgcccaggcctttatggaactaacccgggaaagtcttaaacaaacgtttgatgaaggctgtctgggaaacaaagatgaaaatatttagaaaacaaagccgaaacgtggtagtataggaatacaaactaaatcttataaaacaaaggggaataatcggaaatgcaactattcgatctgccgctcgaccaattgcaaacatataagcctgaaaaaacagcaccgaaagatttttctgagttttggaaattgtctttggaggaacttgcaaaagtcaaagcagaacctgatttacagccggttgactatcctgctgacggagtaaaagtgtaccgtctcacatataaaagcttcgaaaacgcccgcattaccggatggtacgcggtgcctgacaaggaaggcccgcatccggcgatcgtgaaatatcatggctacaatgcaagctatgatggtgagattcatgaaatggtaaactgggcactccatggctacgccgcattcggcatgcttgtccgcggccagcagagcagcgaggatacgagtatttcaccgcacggtcacgctttgggctggatgacgaaaggaattcttgataaagatacatactattaccgcggtgtttatttggacgccgtccgcgcgcttgaggttatcagcagcttcgacgaggttgacgaaacaaggatcggtgtgacaggaggaagccaaggcggaggtttaaccattgccgcagcggcgctgtcagacattccaaaagccgcggttgccgattatccttatttaagcaacttcgaacgggccattgatgtggcgcttgaacagccgtatcttgaaatcaattccttcttcagaagaaatggcagtccggaaacagaagtgcaggcgatgaagacacttgcatatttcgatattatgaatctcgctgaccgagtgaaggtgcctgtcctgatgtcaatcggcctgattgacaaggtcacgccgccgtccaccgtgtttgccgcctacaatcatttggaaacagagaaagagctgaaggtgtaccgctacttcggacatgagtatatccctgcttttcaaacggaaaaacttgctttctttaagcagcatcttaaaggctgataaatgtgaaaagccgccgcatatcatcaggcggtttttttctgcaaactgccggaatgagaacagactggagacgaatagatatgaaacaaagaatcattgatgaattaaaacggatcgagcagtcatacggagtcaaaatcgtgtatgccgtcgagtcaggaagccgcgcatggggatttccctcgcaggatagtgattacgacgtccgctttatttatgtgccgaaaaaggagtggtatttttcaattgagcaggagcgtgatgtcattgaggaaccgattcacgatttgctggatatcagcggctgggagctgagaaaaacgcttcggcttttcaaaaagtcaaaccctccgctcctcgaatggctgtcctcagacattgtgtattacgaagcatttacgaccgcagagcagttaagaaaactgcgcacggaggcatttaagcctgaagcaagcgtgtatcactatatcaatatggcgagaaggaacgtcaaggattatctacaaggacaagaggtcaaaattaaaaagtacttctacgttcttcggcctattttggcctgccaatggattgaaaagcacggaaccataccgccaatggactttactgttttgatgaatgaacttgttgctgaacccgagctgaaggctgaaatggaaaccttgcttgaacggaaaagaagaggagaagagcttgacctcgaagcaagaatcaatgttattcaccaattcattgaaacggaaatcgaaagaatcatggaagcggcaaaagaactgaaggcagagaaaaaagatatgacacctgagttgaaccgtttgcttttgaatacggttgaagaagtgtggaaggatggaggaagctgatgttttttgtcgcttccttttctcctttattcgacagaatcccccccgactttctaactatctgattgtgacaaacccacaaaaataatcagaatctttgtattttgagaatattgtgaacgtcggttttgtccatttacaataaactcatacaaatacttcttagattgcggggtgttgaggttggaagtgatcacaagagattttttcttatttttatccaaaagcggctttctcaataaaatggcgaggaactggggaagccgggtagcagcgggtaaaattatcggcgggaatgactttaacagttcaatcccgactattcgacagcttaacagccaaggcttgtcagttactgtcgatcatttaggcgagtttgtgaacagcgccgaggtcgcacgggagcgtacggaagagtgcattcaaaccattgcgaccatcgcggatcaggagctgaactcacacgtttctttaaaaatgacgtctttaggtttggatatagatatggatttggtgtatgaaaatatgacaaaaatccttcagacggccgagaaacataaaatcatggtcaccattgacatggaggacgaagtcagatgccagaaaacgcttgatattttcaaagatttcagaaagaaatacgagcatgtgagcacagtgctgcaagcctatctgtaccggacggaaaaagacattgacgatttggattctttaaacccgttccttcgccttgtaaaaggagcttataaagaatcagaaaaagtagctttcccggagaaaagcgatgtcgatgaaaattacaaaaaaatcatccgaaagcagctcttaaacggtcactatacagcgattgccacacatgacgacaaaatgatcgactttacaaagcagcttgccaaggaacatggcattgccaatgacaagtttgaatttcagatgctgtacggcatgcggtcgcaaacccagctcagcctcgtaaaagaaggttataacatgagagtctacctgccatacggcgaggattggtacggctactttatgagacgccttgcagaacgtccgtcaaacattgcatttgctttcaaaggaatgacaaagaagtaaaaaaggagagattatcatgacaacaccttacaaacacgagccattcacaaatttccaagatcaaaacaacgtggaagcgtttaaaaaagcgcttgcgacagtaagcgaatatttaggaaaagactatccgcttgtcattaacggcgagagagtggaaacggaagcgaaaatcgtttcaatcaacccggctgataaagaagaagtcgtcggccgagtgtcaaaagcttctcaagagcacgctgagcaagcgattcaagcggctgcaaaagcatttgaagagtggagatacacgtctcctgaagagagagcggctgtcctgttccgcgctgctgccaaagtccgcagaagaaaacatgaattctcagctttgcttgtgaaagaagcaggaaagccttggaacgaggcggatgccgatacggctgaagcgattgacttcatggagtattatgcacgacaaatgatcgaactggcaaaaggcaaaccggtcaacagccgtgaaggcgagaaaaaccaatatgtatacacgccgactggagtgacagtcgttatcccgccttggaacttcttgtttgcgatcatggcaggcacaacagtggcgccgatcgttactggaaacacagtggttctgaaacctgcgagtgctacacctgttattgcagcaaaatttgttgaggtgcttgaagagtccggattgccaaaaggcgtagtcaactttgttccgggaagcggagcggaagtaggcgactatcttgttgaccatccgaaaacaagccttatcacatttacgggatcaagagaagttggtacgagaattttcgaacgcgcggcgaaggttcagccgggccagcagcatttaaagcgtgtcatcgctgaaatgggcggtaaagatacggttgttgttgatgaggatgcggacattgaattagcggctcaatcgatctttacttcagcattcggctttgcgggacaaaaatgctctgcaggttcacgtgcagttgttcatgaaaaagtgtatgatcaagtattaaagcgtgtcattgaaattacggaatcaaaagtaacagctaaacctgacagtgcagatgtttatatgggacctgtcattgaccaaggttcttatgataaaattatgagctatattgagatcggaaaacaggaagggcgtttagtaagtggcggtactggtgatgattcgaaaggatacttcatcaaaccgacgatcttcgctgaccttgatccgaaagcaagactcatgcaggaagaaattttcggacctgtcgttgcattttgtaaagtgtcagactttgatgaagctttagaagtggcaaacaatactgaatatggtttgacaggcgcagtaatcacaaacaaccgcaagcacatcgagcgtgcgaaacaggaattccatgtcggaaacctatacttcaaccgcaactgtacaggtgctatcgtcggctaccatccgtttggcggcttcaaaatgtcgggaacggattcaaaagcaggcgggccggattacttggctctgcatatgcaagcaaaaacaatcagtgaaatgttctaagcgggactaaatgggcatcctccctgcgggggtgtccatttcatccatatactataaaaaagaggaggaagtgccatagaaaacacacagctgattatttcgatttgtatttatatggcgggaatgctgctaatcggctactttgcttacaagcgtacgtcgaatctgacggattatatgctgggaggacgctctttgggtccggcagtaaccgctctcagtgccggcgctgccgatatgagcggctggctgctaatggggcttccgggcgccatgttttctactggtctgagcggcgcttggatcgtcatcggactttgccttggagcgtgggcgaactggctttacgtcgcaccgcggctgagaacctatactgaaaaagcggggaattctattacaattcccggattcctggaaaatcgcttcggagatcaaacaaagcttctcagactgttttcgggaattgtcattttagtctttttcacgttttatgtatcgtccggaatggtgtccggcggcgttttattcaacagcatcttggggatggattatcacactggcctgtggattgtgacgggtgttgttgtggcatataccctgtttggcggctttttggcagtcagctggacagattttgttcaggggatcattatgtttgccgcactcattcttgtgccgatcgttacgtttttccacacgggaggagcaggtgatacagttgctgaaatccgctctgtagatcctgatatgtttaatattttcaaaggaacgagcgtccttggcattatttctttgtttgcctgggggctgggatactttggccagccgcatattattgtgcgttttatggcgataacgtccgtaaaagagatcaaaagagcgcgcagaattgggatgggctggatgattttgtctgcagtaggcgcagtgctgaccggtttgggcggaatcgcttattaccatcagcgcggcatgacactgaaggacccagagacgatttttattcaattagggaatatcttgttccatccgattatcacgggttttctgatttcagcgattttggccgcgattatgagtacaatttcttcccagctgcttgtgacatcaagctctctggtagaagatttgtataagtcgatgttcagacgctcagcttcagataaagaactggtgtttttaggccgactggctgttctggctgtttcaattgtcgcgttggttctggcttgggagaaaaataacaccatccttggattggtcagctacgcgtgggcgggcttcggtgcatcattcgggccggttgtactgctcagtctgttttggaaacgaatgaccaaatggggggcactcgccggcatgattgtgggagcagcgactgtaatcatttgggcgaatgccggtctttcggactttctgtatgaaatgatacctggttttgctgcgagtctattatccgtcttttttgtcagcatattgacgcaggctccgtcacaagctgtcacagaccagttcaacgactaccaagatacaatgtcacaataaagatcgaaaggaggaggaaggggctgtccctttttcctcttttctccttttaagcggccatttttttcttttggaaacaaacgtatttttttctatacaaaaagaccccgtatggatatgattaaagtaaaaaaagtataggagaaaaaggtatggaagagcttttagagagagttttttcattttcagatgttgataagctgattgattttattagctatgaactgcaaaagccagtgatactggaaagcgcggatttctttttgttagcctataattcttactatattaaccattttgattctgccaaccagcagactattttttcgaaaaagtgtccggtccagatttttgagaggtttctgaaggacggaattattgaaaaattgaaaacagagcctgagccttttcgcgtcaataaaattgaaagcattgggttaaaccagagggtggtcgtgagtgcaaagcacaaaggggaagtcatgggctacatctggattcaggagctggaccaaaatctgacggatgaagagctcgactttttgtacgagacctccttccatgtcgggaaaatcatttataaaacgaataaattgaaacaggaaaaggaagaaaaagcagaggatctcatcaaacgggcgatctatcagcaatttacctctgagaaggaactcagacgggaagctgaaaggatcaacaccgtgctgccttccatgttttcagttgttatcctgcacgccgcaaatggggatggggaagcggttgaggatttaaaggaaaatatcaggtcgtacctgaatttacgggataaggtcagtcatgtcttaacgatcgaatcaaacattgtcatcgtcgtagcgagtttttcccaaaaaagctccgtctcctcagcagcttctgagtttattaacaagctgttaacacattttcactttcaaaaaatacctacccctatttatatcggtatcggaaacgaatataatcacctattaaaacttggcaagagctacacagaagcacttgaagtcatcaaagccgcagaaatcaccggcaatcaggaaaacattccatatgaatatgccaaactcggcatttaccgctatttagaaagcatcgaacagaaaaatgaatttttagaatacgagaataaagatttagctttattaaaagcaaaagacgaagaaagcagcactgagctgctcaaaaccttggaaatctatctcctcaacaactgcaaaacaaaaccagcggcagaacagctgtttattcaccaaaatacattgaattaccgcatcaaacagattactgagatgacgtcgatcgatttaagcgatttcagaacgcggtgccagctctatctcgatttgatgctgatgaaaaagaaataaaaaagaaaccagtacttgtactggtttcgtcttcacttaaaatcctctgtaaacatacggatcatcaggttttttaatggtattccagtcagttactttgacgacagggagagttgacttgaatggctggtaatactctgaggccagagtgcccttaatgtgaatccattcatcatccttgatgtccatgtccttcggaaattccacaagcatcccgtacacgccggaatcagcgatacagtgaatgatgccaaaccttaatacgaacagctgatttttgttaattgcgtttcctttgtaagcaaatccatggaattctatcgtccgtccgagaaattcacccggatagttatagatggtttccattccttttaggaaatcgtcatcggtcagagaaatctcttttttgctggaatacttattaaacagctgtttcatttgtttgtcatagctgtcttgcgcgtaataaaggctggcatcaggccgcaaatactgtgtttgggagtaatgatctccgctctccatcgccttaaacgagaacccttttgttttgacaatggatgagtcaagcgttgcaatcgggaagaagatgcctgacaccaaaggaaaaagaaaaacaacataaatcaaataacgctgataaaatggcttgttttgttcatggtcatgctcgtgatcatggccgcacccgcaatcatggtgacccccgcttttttcaggcgacttgataaatagatatgcttggacggcggtcagaatagccagcaggaaaatcgcaataaaggatagataggaatatttcatattgatatattttgttagatttcctgaggcatgcagatgataaaagaaaaacgtaaatcccatcagcaccaataaacgaaacatccaatcacccctttaccagtagtgatcccgctaaaacaatcacgacaatatatgtaatcagcaggaaaacaaatcgttttttgaaggctgcaagcatcatcaatagattcttaatatccaccattgcgccaaagacgagaaaggcgattaacgatcctaatgaaaatgtgctgctgaaggaagacgcgatgaacgcatcaacttctgaacaaagcgacaggacaaacgccagacccatcatcacgagggaagaggatacatcattctgcccgatcgcaagcagagtggatgttttgacatacgtctgcatagcggctgcgataaaggcgccgatgattaaatatttccccacggagaaaaattcatcaatggcatgccgcaaggtcccgcccagtttttggagcaaggtgccgtgatgatggtggtggtgcccgggttcatcaggctttaaaagctggttatctttaaattgataggataaaatgaccccgatgatcagcgaaacggcgagagccagtccgcctctgtaaaagaccacgctccatctattcccgaacgcaatataagtagaaaataaaacgataggattaatgataggcgcggtcagcatgaaagcaacgcccgcatgcagaggaactccctttaacagaagccgcctcgtaatcgggatgatgccgcattcgcaggcgggaaataaaacgccggccagcgcaccgaataaaacggcgagaaaacggtttttcggcatgattcttgcaatcatttcttcagaaacaaacatttgaatgattccggaaagtatgacgccaatcagaataaacggaatggcttctattaaaatgctgataaaaatagaattcagctgaagaaaagatgattgtgctgtcacaataaaacctccgctcatgttaagctgcctttcttatgataccagaaaaaaaggcactgcttgtttgacggaggaagggaaaggatcgtttcactttggttaggattccaaaaaaccgagtaggatactgtctgtttctgcagcttcttttccgagccaaatcaggtgtccccatgagtgaagcaaacagagaacagcgccacgaatgtgctcttttgcatgatgtgcatgtgacaagtcaaccaatccatcataaacactttgcataatcagcacgggacatatgatggcttgcaggtcttttaaagagacagcggcggtttgtgacaagtcaatcagaaatccttcacccgagcgctgccggctgttcattttccgaaatgcttctatgtctttttcattcatcaaggacttgattcgctgaaacggaagcgtgctgaattgggggctcatagctcgaaacatcaaacgcgggaaagcgttattcaaggaagaaatcagcttccatatccacttttctaccggcgggcggaagagaattttccccaatttatattcagtgtcttttggggtgagccactctttggtgactgcggattgcagggtcaatgtatttactcttttcggataatgtgaggcaaagcatatgccgctcggccctcctgctgagatggcgatcacatggacactctcgatttgtagatgatctaataatttcacatagaaacggcaggcattggcaagactttttccaatttcttttgacgtccgtccatagccaggccttgaaggcgtaatgatggaatacccttgctcaatcaacgctgtgtatccgtattcctcgtaacaatttgaatgcccgccatgcatgacaaggatcggagttcccttgcctgtcacagaatattctagtgtactgccatcgaaggtgatcgtttcgactcgtcttttcatctgttactcccatttgttttttgcctattatagggttttcagcaattgaccacaaggtgaagaaatgaataaacacaagctcgtgaaatatgatatactttgtattgatattcattctcaattaaaatgatttgatatagatgtgaacgggaggcaggacggatggctgagaatcaagaggtatatgacgttacgataataggcggggggccgatcgggctgtttactgctttttactgcgggatgcgggagctgaaaacaaaggtaatcgaatttttgccgaagctcggagggaaggtgtctttattctttcctgagaaaatcattcgcgatatcggcggcataccggggattgcgggaaagcagctgatcgagcagctgaaggagcaggcggcaacgtttgatcctgatatcgtattgaatcagcgtgtgaccgggtttgaacgcctagatgacggcaccattgttctgacgggttctgaaggggagaagcactatacaagaactgtgattttggcttgcggcatgggtacacttgaggtcaatgagtttgacagcgaggatgcggccagatatgcgggcaaaaatcttcattatggagtggagaagctcgatgcgtttaaagataagcgcgtggtgatatcaggcggcggagatactgcggtcgattgggctaatgagcttgaaccgattgcggcgtctgtgactgtcgttcatcggcgtgaggaattcggcggaatggaaagcagcgtgacgaaaatgaagcaatcatcggtgcgggtgcttacgccttatcggctggagcagttgaacggagatgaagagggcatcaaaagcgtgaccgtttgtcatactgagtctggccagaggaaagacatagaaattgatgagctgatcattaatcatgggttcaaaattgatctcgggccgatgatggagtgggggctggagattgaagaaggaagggtgaaagctgacagacatatgcgaacgaatcttccgggcgtgtttgtggcgggcgacgcggctttttatgaaagcaagctgagattgattgccggcggatttacggaaggcccgacagcggtcaacagtgccaaggcttatctggaccctaaggccgagaatatggcgatgtattccacccatcataaaaaattggtgcataaataaaacagcccttgggggaaagggctgccagccatcagctgtgaaggagctttttctgcgtctgttgattctgaatgaaagctagcaattcatcctgttcttgtacagctgtgaatccataagcttcggcagctgagtcatcgcctatacagacgatagggggccggcttgctgacaattccggcgaaatgccaatttgttcgccaccattgatcaattgctgaacggacagcttgttcgggcaaatgaccatgtgcagcggggattcactgatggtacgctgaatcatgtgggtgaaccggtcatctatgacgttttcatgagtgatataaaacgaacaggattcatgcttttgcatgttttccactgcatggcggctcccgacaacaagacgtttctctgaatcaggctgaatggcggtgacaagaaagccccgtttctcaagctctgtctttgcttgctcagatgctgcactcagtttggctgtcagctggcggatgtcgattttctgagaagccagtgctctgaaaaattcacaaaccgcccggcgcgatgtgaaaaaaacgtcttcaaaggtgccaatctttcgaagaatttcttcattgacaggcatgttttcggtccgccatttcggccactcgatgagatcggcgccggaatcgcgcagcttgtctgcaagcgggtcttcatcttcgccatgagtcacaaccatcaaatgccgtccgatgagcggtttgctttcaaaccagctgtgtgtttgaaagttgacgatgtctccgatgacgataatcgcagggtttgtaatctggtgttcctgcactttttgctgaatgttctcaagtgttcctttcacactccgctggcggccccacgttccccattggatgacaatgacagggacagaaggcgatttcccgtatgaaataagctgctggcaaatataagacaagttcttgacacccatgtaaaaaacaagggtttgaacgcttcgggccagcccttcccagtcaaggttcggcgtgccttttaatgatttatcatgcgctgtaatcatggcaaaagacgatgcaaaatcccgatgcgtgacggggatgcccgcatatagcggcgctgcaattccagaggtgattcccggcaccatttcatagcgaatgccgtgctcatgaagagcatctgcttcctcgccgactctgccgaatacgctcggatctccgcccttcaagcgaacgacggttaacccatttaatgctttttcaaccagcagggcgttaatttctttttgtttcataaaatggcggtttggcagttttccgcaataaataaactggcagtccggtgatgcaaattcgagcagcttcgggttggcgagccggtcatataaaatcacatctgcttccttgagcgcctgttttcctttgatggtgagcaggcctgggtcgccgggtccggctcccacgaaatatacgattccgttcttcatgatcatgtcatccttccgtcactgtaaaaaatgaaggaccactagaaaagtgatccggtcttttgatcaatatacgagataaacatgttctccttcgatcagcgtttcatatgttttgacgcatccgtggtcaggttcttggacgattccgtcttctaaggaaattttccagtcgtgcatcgggcagaaaacatattgaccgctgacgatgccttctgccaggacgccgcccttatgcggacagcggttttcaatggcgcggatgcttccgtctgaaagcttgaaaaccgcgagctccttatcttcaatatacactgttttgcctaattgttcaggcaattcttcaatttttccgatacatacttttgttacgtctttgtttaccatgtccattcctcctcaatgatagtttttgtcattatgatgtggtcacgacattttcaaataattctttagaggtttgtttatcctctaaaaagtctttccacggatccttgtggacagagagtgtttcattcattcggccgttcagctcctgccgcttttccggatcgtttaacacggattggacatgggataaaccgacgcgctcaagccatgcggacgtacgctccagatagtttgcggtttccctgtaatattgcaggtaagcgcctgcgtattctaagacttcttcatttgttttcaccttcatcagcaaatcgccggcacgcaagtgggttccgccgtttccgccgacataaagctcccagcctccgtcgatgccgacaacgccaaggtccttaatgccggattccgcacagtttcgcgggcatgcagacacggccattttgactttgtgcggcgtgtttagcccttcgaattttttctcaagcgcaatgcccagtgccatggagtcttgtgtgccgaagcggcagaattgctcgcctacacatgttttcactgtgcggagcgtttttccgtatgcgtagcccgacggcatatcaagatcttcccataccttcggaaggtcttcttttttcacgccgataagatcaattcgctggccgcctgtcattttcacgagtgggatctcatatttgtcaacgacatcggcgatcttgcgcaaatctgtggagttggtcacgccgccgtacatccgaggaacgactgagtatgttccgtctttttgaatattggcgtgcattcgttcattaacaaagcgggatgtccggtcatcctcgtatttggttggattgatcatgcctaagtagtagttcagagccggccggcatttggaacagccttctggcgttttccagccgagcacattcatgacttctcttgtatgtgacagccctttggctttgatttcttctacgacttcatctcttgacaatgtggtgcagccgcaaatggcttctttttgcgctgacgcatcaaagtctgatccgagcgtatgctggaggatttcttctacgagtggcttacagcctccgcatgagcgggatgcgccagtgcatgctttgatctcgtccgttgacgagcagcccttttcctgtatggcttgaataatcgcaccttttgacacgccgttacagccgcagatgatttcatcgtcgctcatcgctgcggtgatgcttgtgcctgcttcttggttgagaggctgtaagattgatattttagaggtttcagagatatcggcttctttttgaatcatagaaaacaggcgattgccttcgctgctgtcaccgaataaaacagcaccgacaattttgttgtctctcaggacaatttttttatagatgccgtcctgctcatcgaagactttaatcgcttttttgtcctctgattcatcaaagtccccggcagagaaaacctcgacgcccgatacctttaactgtgtggagagaacggagccctcatacgggtttgtttcgatgccgcaaatatgcttcgccagcacttttgcctgttcatagagcggcgccacaagcccgtaggcgattcctcggtgctcggcacattcgccgaccgcgtaaatgtgcgggatttcagtctgcatataatcattgacgatgatgccgcggttaaccggaatgccgctctcggccccgagcgttgtatttgggcggatgccgacagccatgacgactaaatcagcttcaatgcttgtgccatccttgaatcggaggccttcgacacggtcgtcaccgacaatttcttctgtttgcttttcaagtaaaaaggtcataccttgtttttctaactcgttttgcagcaggcgtcctgccgttgcatcaagctggcgctccatcaggaatggggcaaggtggatgacggacacatccatgccaagattcagcagtccgcgagctgcttccaaaccaagaagtcctccgccgatgacggcagcttttttatattgttttgacgcggcgagcattgtgtctgtatcttttatgtcccggaaagctgtgacgccttttttgtctgcgcccggaatcggaaggataaaagggaccgagcctgtcgccaggatcaattcatcgtaaggctggattctgtctgcatctgtgatgactgttttgttttccgtgtccactttgatgactgtttcatttgtatacaattgaatgttgttttcttcgtaccagtcccaatcgtttaacgtaatatctttaatatctgtatcgccttgaagcacttttgacaaaaggattcggttgtaattgggatgcggttcggcaccgaaaattgtgatctgaaactcgtctttagcaatactcagtatctcttcaatggcccttaccccggccattccattaccaacaagaactagctgtttttttcccatcagatgatccgctccttatcaatgttttttccagcgtagcacagcaaaaaggaatatttaagatacatgttataaaatgtaacaaaatatacgaaaagttctaaaaattttatgaaaaatttaaataggtctgattcggacggcgcataccttaaaaccgggcattttacaggctggatctaaggcttccccgattaaatcattcacattttgagcgtctgcccaatggatgggaacaaaaacagtatcttttctgatttgttctgataatttgctgcggacggtgatgcttccccgcggcgattctatttttaccagtacacggtcctcgatattgtaggtcgctgctgtttgcggatggatttccataaacgattcaaaatgtctcgcggcaagggcggcgctttttcttgtttggacgcctgttaagtagtgagacatgactctgcctgtcgttaaataaagcggataatcggctgtcggcttctcttttggaacaggtggttcgtttggaatcacacttaatgccgctttttgatccggatgagcaaatgattctgtaaacaagcgcccagttccgggatgatcagattccggacacggccaatgaatgccgccttcacgtctgagcctgccgtatgagatgcctgaataatcggcaatcccgcctcggctcgcttctctcaattcattaaaaatatcctccgctgacgtataagaaaagtagcggcccttgccgagagcggatgcgagatcacaaatgatctgccaatcatgctttgcttcgccggggcatggccggcttgcttctcttaatgtcacgcgtccttctacatttgtcatggtgccttcatcttctaagtaagaggaggcaggtaaaatcacatctgcgtatttcgcagtctcagaaataaacaaatcgattgcaacaaagaatgtcagtttccttaaagcctttttcacgagattcgcatttgggctggagacagcaggattggagcacatgaggaacaatcctttgatgtcgccgtcgttgattttttccatcatttcataggctgagacaccttttcgcggcagatcatcctgatggattccccacactttcgcaacatgtgcccggtgttgttcgttttcaatagatcgatagcccggaagctgatcggctttttggccatgctctcttgcaccttgcccgttgccttgtccggtgatcgccccgtaacctgagtaaggcttgccgatttttcctgtgatcagcaccatgtttaagaagcctttcacagccgctgttccatcggtttgctgttcaatcccgcgggctgtaaacagcatgccggacgtttccttggcaaactttacagccgcttttcttatatccaccagggggacactcgtctgttcggcgatgtcattcaggtccaacgagtcagtatgctgcttcagctcttcgaatccatttgttcgtgattgaatgaaatcctcgtttataagctgttcgtcgatgatgattttgacgagaccgttggcaagggcggcgtctgtgccgggtttgattttcaaatgaagatcggcgatttttgttgtcgctgtttcacgcggatcaatggcaatgatgtaagctccgttttctttcgctttttcaaaatatggcataatcgtaggctggcactccgcgatattggtgccggccagaatgatcacacgggtgtggggaatgtctgataagggattcgttaagcctctgtccgcgccgaatgtttggttggctgcggttgctgcggcggacatacaaagcctcccgttgtagtcgatgtattttgtctgtaagcccacccgtgcgaatttccctaacaaatacgcctcttcatttgtaatcgaggcgcttccgtataccgccatagcgtcatggccgtgttctgcttgtatcattgtcacttggtctttaatgtaattcagtgcttcttcccaggaaacaggcataaactcgccgtttttcttcagcagcggccgggtgatgcgggaggagttcagggcatgctggtgggcgttcatgcccttcatgcatagccgaccctgtgttgtaggattatcaatcccgatcgcagtgtactttttgcgcgtgacgatggtttgttccacgagctgcattttgcactgcatgctgcaaaacgggcattgagtgtcatatgttttttctgattggacgtcttgctgtttatcacggaaatatctaagcagtcgttcagtcaaaatgcctcatcctttcttatatgcacccgtctctacagtcgggttttgaatcagtgacagatctgtttggaggctttccagcagctgtgcccttaggtcttcttcgaatagcacttctctgatatgaacgatcccgagacggtctatccactgatgaacaccttctaagtaatgagccgtttcccgataatactggatcagtcctttgatcatgccggcagtgctgtcttcgttctcagtcacgcaaaacaaagctcctgaacgggcatgagttccccggacgccgccgatgtgaatgtcccagccagcttgtctccgaattgcgccgacatcttgcagggcggcatcggtgcagtctgtttcacatgataagctgatagaaatgggagcgggtaagggaagcgtctcaagttgtctttcgatttgggctgccagctgctgaatcgatcgattttgcccgcatgtacatgctttgatgctttgcagcgtgtgtcggtgttcattggtgtaaacgggcattttcagatcttttttcatgttcgggagatccgcaggcttgatcccggaaagcttcagcctttggccgtgagtgatggatacgtcgggaatgctgtatgcctcaatgatgttggcgatggttcttagctgctccgcgtttgtccgcccgccgtacatttgcgggatcaggatgcatgtctcttcagtggctggctcaggctggacaaacccagggtacagcatttccagatagtattgaatcgcaggaacacaagtactgcatccgttttttgttttccagccaagctggttcatcacttctgccggattagtgaatggcctgcgctgaagctcagcgatgatgtcgtcttctgtaaaatcagtacagctgcaaaacgaaggtgtgccggcgggcttcgtatattcgctgttggtcatgtatctcaaaaggtcttcaacgagcggtttgcatcctccgcaggacccagtggctttggtgcagtgcttgacttcctcaacagttgttaagcttttcgtgtacaccgcgtcttcaatcgcgcctttcgtcactgtgttgcattggcaaatcgtttcactggaaggcatggattcaaataaagggccgcttgtctccggttcgatgatctgctttttgacaatggagatgtctcgttgtttaagcaggctgtcgagaagccgctgcttgtcatgggtgtctccgaataaaataacgccggccagtttgtcatctacaaaaagtgcttttttataaacgcctgcttgttcgtcgtagattttgatgctcgtcgtgcgttcatcctcttggatctttcctgctgaccacacatcgattccagctatttttaacgccgaagatggtgctgagccttgatattcctcacatggaacgccgcaaatatgactggcgagaacttttccctgctcataaagcggagccaccaatccgtacaccgttccgttatgctcagcgcattcaccaacggcgtagatattcggttcgcttgtctgcatgaagtcattcacgatgatcccgcggttcactttgattccagcagatacagccaattcaatattcggtttgacgccggccgccatcacaatcaagtctgcttttaatgaagagccatctttaaaatggattcggtctgccttcgtggcgccggaaatggagacggtgtctttctccaaaagaaaggttaggcctttttgttccagctctgtttgcagcagccgcgccgctgtttgatcgagctgtttttgcataatgccggcggagtggtgaatgacgctgacattcataccgagatgctgtaaaccgactgcagcttccagtcctaataagccggctccgattaccgcagccttttgaaagtgctgggccatcttcatcagtgcttggcagtcttctattgtccgaaatccatagacaccttttttgtctgccccggggatagggagaatatgaggggaggagcctgttgccactattaatttgtcatacgacagagtgcgtttccgatctgtgatgacctgctgctgatctgtatcaatttgaataaccttttcgcctgtgtaaagcgtgatcccgttcttgtcgtaccaatccttgctgttcagtgtaatgtcatcgagtgacgcttcaccctgcaatacagaggataagagaatgcgattgtaattgggatgcggctcgcttccgaaaatgacaatctcaaacatgtggcgattcagctttaatacttcttcaatacagcggattccggccatgccgtttcccgctaacaccaatctttgtttcttcatgtattagacctcctttggcgaagctcgtaagttttctcctattaaaaattatgtcacaatgcactgttaacgcattaaacgtgtcacaaaaacttacacatgtcttttccagaaaataatggtcctatatccttgattcagaaaatgtaaaataatgagggtctagaaaggggaatcttatgaagctgtcggaactgaaaactagcggtcatccactcactttgctctgttcctttttatactttgatgtcagttttatgatatgggttatgcttggggcgctgggtgtttatatttctcaggattttggcctgtctccttttgagaaagggcttgtcgtagctgtgccgattttatctggatcagtgtttcgtatcattcttggtattttaacggatagaatcggaccgaaaaaaacggcagtgatcgggatgctggtgacgatgattccgctgctttgggggacattcggcggccgttccctgactgagctgtatgccatcgggattctgcttggcgtggcgggggcaagttttgctgtagcgctgcctatggccagccgctggtatccgcctcatttgcagggacttgcgatggggattgccggagcggggaacagcggcacgttgtttgcaaccctgtttggccctcgtctggcagagcagttcggctggcacattgtcatgggaattgcgctaattccattattgatcgtctttattctttttgtatccatggcaaaggattctcctgcacagccggctccgcagccgctcaaaagctatctgcatgtgttcgggcaaaaggaaacatggtttttctgcctgctgtacagcgtcacatttggcggatttgtcgggctctcaagctttttatctattttctttgttgatcaataccagctatcaaaaattcacgcaggggacttcgttacattatgtgtggcggcggggagctttttccggcctgtcgggggcttgatttcggatcgtgtcggcggtacgaaagttctttctgtattgtttgtcatcgtggcactgtgtatggccggagtcagcagcctgccatctctctcaatggtcattgttctattgtttgtcggaatgatggggctcggaatgggtaacggtgcagtattccagctcgtgccgcagcgttttcgcaaagaaattggcatggtgacgggaatcgtcggtgcggccggaggaatcggagggtttttcctgccgaacatcttaggatctctcaaacagatgacaggcacatatgctatcggttttatcacgttttcctgtatcgcgctgctggcgtttgcacttgtgcttgccgcaggctattactggcggaaaagctggagcgcggaaagcagcccggcggatgtttaggattttgacggacacgcgtttgtgcgtgtcttttttattttctcttgattttcaacagtgaaccgatcaaaataaatagtaattattacgatttgttagtgagaggagttttctgaatgaatcaacatacgctgctcccgaaaaaaacggagcgtcttcaatactttggatcggtcagtccggtcaaaggcgagaaaccagtggaaaaagagaaaatgaaggacctgcaaaatatcaggaaggattatttttttgacattcagcatgtaggtgtcgctaatgtgtcccatccagtcacaatcacttctgccatgatgcctgccgagcaaacaacggctgcgaactttacaatgacttgtaatttgccgagaaatcagaaggggattaacatgagccggttaacagagctgctgcaagtctatcatcaaaatggctggattctctcattttcctctcttcagcaatttacgaaagagcttgcagaaaacatggacacatcatctgccacagttgaagtgaggtttccgtggtttttcgaacggaaaagcccgaagcttgagaaagcgggtttgatgcatgctgatatattcatgtctgtcacctatcacaaagatcagccgtttaaacagcgtgccggcatctcagcaaaagtaacgactctgtgcccttgctccaaggaaatcagcgaatacagtgcccataatcagaggggaacggtcagcatttgggcggatattcacccggccgcatcgctgccaagcgatgttaaagctgatttgcttcacgccgcagaatcaaatgcttctgcgagactgcatccggtattgaagcggcctgatgaaaaagccgtgacagaaacggcctatgaaaacccgagatttgttgaggatctcgtccggctgattgctgctgatttgtttgagcttgaatgggtgtcggcctttgagattgaatgccgcaatgaagaatcgatccatctccacgatgcctgcgcgaagctgcgtttttcgaaggaagtggataaaatatgaaactctcattattcattattgcagttcttatgccagtcagcctgctgtcagcctgctccgatcatgcagaagaacacgcaagtatcaatacaaagaaaacggtcgaaaacataacggacgttcgaaaaacagcaaaaacaagcattgattggacaaagccttcgggcggagaatacccggatattaaacagaagcatgtctggattgatgtgaatgtgaaggagcagaaggcttacatcaaggaaggaagcaacaccatctatacaatgatgatctcttctggtcttgatcaaacaaaagatgatgctacgccaaagggcaccttttatgtagagcctgaacggggagaatggtttttctccgaaggataccaggaaggcgcagaatactgggtatcatggaaaaatcacggtgaatttttatttcatagtgtgccaatgactaaggatcaaaaagtcatcaaaacggaagcagaaaaactaggaacgaaagcatctcacggatgtatcaggctgaccattccagatgcgaaatgggtatatgaaaatatccctgaacatacaaaagtggtgatcagctgaattgaaaaccgttgacaaaaaggaaaaaagaccatacaatttaaatcgtaacaattgcgttttatgataaatggcttatcattggctgtatctgtgaaaagcggaaaggctaaggatcttgctgtcattgatccccatgaagcgtctcttgaaaactggaaacgaaacccaagctactttctgatgagatatttgcgctttccatcggttcagcaacgcaagtggagcgattgctttatgcaagctgcggttttccgaatgtcggcaaggatttgcgatggggaaaaggattaaacgcggttgaagcctttactgatttagaaaccgggtggcagcgagaaatgagcgcgaaaagctgctctacactattgtacatatggcgaagtatacaatttaaatcgtaatcattctattttaatggaggcattattatgaaaaaaattccggttaccgtactgagcggttatctaggtgcgggaaaaacaacattgctgaacagcattctgcaaaatcgcgaaggcttgaaaatagcggttatcgtaaacgatatgagcgaggtgaacattgacgcgggcttggttaagcaggaagggggcctttccagaacagatgaaaagcttgtggaaatgtcaaacggctgcatttgctgcacgcttcgcgaagacttattaattgaagttgagaagctggcaaaagacggacggtttgattatatcgtcatcgaatcgacaggaatcagcgaaccgatcccggtggcccagactttctcttatatcgatgaagagatgggaatcgatcttacaaaattctgtcagctggatacgatggtgacagtggttgatgccaaccgtttttggcatgattatcagtcaggcgaaagccttctggaccgcaaagaggcattgggggaagaggatgaaagagaaatcgccgacctcttgatcgatcaaattgagttttgcgatgtactgatcttaaataaatgtgatttggtcagcgagcaagagctcgaacagcttgaaaacgttcttcgtaaactgcagccaagagccaggttcattcgttccgtcaaaggaaatgtaaaaccgcaggagattttgcatacagggttatttaacttcgaggaagcgagcggatcggccggctggattcaagagctgacggcaggccatgcggaacacaccccggaaacagaagaatacggtatctcttcatttgtatataagagacgtttgccgtttcattctacacgattttaccgttggttggatcaaatgccaaagaacgtggtacgtgccaaaggaatcgtctggtgcgcatctcataacaaccttgctttgctgatgtcgcaagcaggtccgtcggttacgattaagcctgtatcttattgggtggcggcgctgccgaagcttgagcaggagcaagtcaaacagcaggagccggaaatcctggaggagtgggacccggagttcggcgaccgcctaacgcagctagtttttatcggaactgacctggatgaagaaacgatcacgaaagagcttgatcaatgcctgctgactgaatatgaatttgattccgactggtcgctgtttgaggacccgtttaaatggaagctgaatcaatagaaaaaaagccgtcccctggggagcggctttttttaatgaaacgtttgtttaaacataatgagcgtattttttctcaaggatattctgaaagaccgcggcaatggagcagatggcccaataaatgagagcggtcagaatatacatggtcatataatcaaactctctgcccccgatgattttcgcatgctggagcaattccggcactgtaatcatcgcagcgagagatgatgccttgattaagtcgagcaatacattggcaagcggaggcagcgcaatacgtatcgattgcggcaaaatgatgcccctcatcgtctgccaataggaaagacccagcgaggatgcggcttcccactgtcctttttcgacggatgaaatggctgaacggttaatttccgcaatgtaggcggcgctgtttaggctaaagccgattaaagcagccgtgacagcggaaaattcaatgccgatataaggaaacccgaaataaaggataaacaaaatcaccaaaatcggaacgccccgcataaatgagatatagagcttcgccggccatcttaacaaagcaagcttagacattctggcgagtgatatgaacaggccgatcacagttcccgcaaacatgcttacaaaagagataagcagtgtatacccaatgccttttatgacataagggaacgattcaatagccagcttcgtgttgaaaatatattcccattgaatgctattgatcatggcgtccgattacaaatcaacgtcctgaacgtcggcatcaattttttttgatacatctgctttattgaagaattgtttcgacagtttagtcaaagagccatccttgctcatctctttcaatgcttcgttcatctttttctgaagtgccgcattgctttttttcatgacaagggcctgtttgttcggcatgtacttgatgtcaggatgaattgttatgttgagatccgggaatgccgcgagcgcaagtgtctgcaggtaatagtcgtttaaaatgacgtcagtgcgtccgttggcaacatcttttaaatattgctcattcgtcgcattatcataaatcacttctttggcgccgtattttctcgcgacctccatgtagacggttgtagccgcgccagccgctttcttcccttttaaatccttgagcgttttaatccctgataaattgtcttttcggacaattgccgtgccgtatgaatatttataaggagtagaaaatgcgaacttcttctcgcggtccttcgtcacatcgatgtcattcgcggctgcgtcaacctgtccgctgtttaccgctgtcagcatcccgtcaatgcccatctccttgaactcaaccttcaatcccaggcgttttgccgcttcacgaacgacttcaacctcgtagcccgtcagcttatcagagccagagtcagtatcgtgataagaagtgggataaagcgtgcctgatgtagcgactacgattttccctttatccttaatctgctcccagcctgtatccttggaatcggcttcatttttgccggaacaggctgccaatataagaaagaaagccattgtgaaactgaatataacggctttggaatgcatgaatgatttcacctatagttcccccaatctgttaatcaactaaaaagatagcattgaacataaggggttgcaatatgttgatcgcgttttcaaaaagttcgaattgtgtatacaaaaggcatgggtgggtgattaaaagcggctatgaagggaattggtgatgaacaaaggagttgtccaaggatgaatgcccgacgtaccaaggaaacacatgtggacgtgaaggatgcagtagatccgttattcctctatgccaataccgtaagaaatggtcagaagcatgaaatcgatcttcagaataaatttaagtcttgctgatgcccctaagacatatgatatatccgatgagaaagaaaatggaaacatttaaaccataatggggagtcaaatgaatatttacaaaccagccggattttggatcagacttggagctgcattgttagactatattatagtctccgtgccgcttttgctgatctattggctgattacaggaaaagacccaaacgacagcatgttcatcagtttggttgttctgctgtattctattttgctgccggtgttttggcgcggttatcttatcggaaaaaggatctgcggaatcagaatcgtaaaaaaagacggatcacaggtcagtctgttaacaatgtttttacgggttattgtagccggcctggtttacgttataaccttcggactcggcttgatcgccagcctgattctgattgccgtacgagaagacaaacggaccctgcatgatttaatcgcgggaacatcacttatgcgaccaggtgaagaagaacttaatgctgacgaagagattagaaagagcgaataatggttcgctctttttatttttatgcataaaaaatacaaggcagcaaaacatatgaaaaataggattggaggaataaactggatgaaacgaataaccatcaacattatcacaatgttcattgcagcggctgtcatttctctgaccggtacagctgaggccgctgaaaaacagcagcagtctcccgcaaatgttacactgacagatcagcaaaagaaagagattgaacaactggaagcagagattcttaaaaagcgcaaagacgtgatctcaaagtatgtacaatacggtatcctgcctaaagaaagaggagaacacatcaaaaatcacttggacaaacactttgaaatgatgaaacaaaacggctttgttccaaagcaccatcctcatccgcataaatttgaaaaaagacattaaaatggaaagcatccaatgggaattgggtgcttttttattgttaaaagttactgaatgaattttccggaaaaatatatcgcttttgttgattatatcttataataagatataaatggggtgtataatgatggaaatggatttaatctctaaacttaatcagcagtggacagatatttattatttattacattatcaacataaagataatatttctcaccaggcaatacggattatgcagcatattgaaaagcaaggtgaggcaacaataggagctttggctgaatacttgtctgtctctcacaatacggcgtcagagcatactaaacgtttgattcaaaggggatttatagctaaacggcgaagtcaacaggatgaacgaaaagttttagttttcttaacacaagaaggaagatctgttcttgaacagcatacacagctagataaagagaaattaaaagaaataattgaacgaatgagcacattagaaaaagaattacttgaacaggcatttgaacttttaagtagggaagctaaacaatggcagttttaagtaaagtgatcatctctgcgttgattatcggttttgttactgaaatatcaaaaagacatccgacctatggcggcatcattgctgctttgcccttggtcagtttattaagccttttttggatgcaaatacaaggtgaaaaaatagctcaattaagtcaatttgcatctggtgtgcttacaggaatcccagctacagtttgtttactagctattttggcttttttgctgaaaattcatgtgccgttttggtttgcattatgtgttggaatactaggatgggctatgtttttatggatgcagaagatctttctcaatatattatttaactgagtatagaaaggagatgctatgtttttaaaaaaggttactcttcttcgagataagattttggactttgacagatttccttttactatcccggctataagtcaattaaatgacatcttatttactagccaagtgactttttttgtgggggaaaatggatctggaaaatctactttgcttgaagcgatagcagataagtgtgaattcaatacagcgggcggaagccgaaataatgtctatgaattacgggagtcagattcccatttaggagattacatacgtttatcttggcttccaaaggtaacaaatggcttcttcttaagggctgaatcgttttatcatctttctcttcatctggatgagatggaactagatgctcctcagccataccgttcctatggagggagaccgctacacaatcaatcacatggagagtcctttatgtctctattccgtcatcgttttaaagagaaagcgatttaccttttagatgagccagaagcagcactttctccagctagacaattagcttttttgagagttatacatgatttggtgaagggcggaaatgtacagattatcattgcgactcactccccaatcctactgggctatcccaatgctaatattttaagctttgatggtggaagaatacatcatattgaatatgagaatacagagcatgttcaattaacacgatattttcttggacaaagagaaaaaatattagctgagctgttccgcgactaacatcgagttgatctgaaacgcgtttcatagcctatgataggtttatcaaataattcaggagtgataaacactatgatccaccagcatccagaatcttttccgaaacattttttgtggggctctgcttctgcagcgtaccagattgaaggcgcttggaatgaagatggcaaaggcccttctgtttgggatgtgtttacgaaaataccgggcaaaacgtttaaaggaaccaatggcgagattgcggttgaccattatcaccgatttaaagaagatgtcgctctgatggctgagatggggttaaaagcatatcgattttccgtcagctggccacgggtttttccaaaaggaaaaggagagatcaatgaagcaggtctagcgttttacgatagtctgattgatgaattgctttctcatcacatcgagccggttctgactttatatcactgggatttgcctcaagcgcttatggacgaatacggcgggtttgaatccagaaacatcatagaggattttaatcactactgtattactctttataaacgttttgaagacagggtgaaatattgggttacgttaaacgaacagaactacaattttaatcacggatttattacagccatgcatccgcctggagtgaaagacagaaaacgattttacgaagcaaaccatattgcgtttctggctaatgcaaaagccatcgaatcatttagagaatatgtgcctgaaggcaaaataggtcctagctttgcttattctccggcttaccctttatcaagccatccagaggatatactggcatttgaaaacgccgaagaatttatgaacaattggtggcttgacatgtattgctggggaacctacccgcaaattccattccgctacttggaaaaacagggatgggcgccgacaatcgaagcaggagatatggagctgcttgccaaagggaagcctgattttgtaggtgtcaattattatcagacgatcacctatgaacgaaatccgcttgatggtgtgtctgaagggaaaatgaatacgacaggccaaaaaggaaccaatcaggagacggggatacccggggtgttcaaaacgaaaaaaaatccgcatctgacaacgagcaactgggattggacaattgacccaattgggctgcgtatcggtcttcgccgaattacaagccgctatcagcttccagtgtttataacagagaacggtttgggtgaatttgataaagttgaggacggcactgtacaggatgattatcgaattgattatttgcgttcgcatcttgagcaatgcagacaagccatcagtgacggtgtcgatttaatcggctattgcagctggtcgtttactgatctgttaagctggctgaacggctaccaaaaaagatacggatttgtatatgtcaatcgtgatgaagaaagcacatacgatttaaaacgcttgaagaaaaaaagcttttattggtatcaagatgtcatcaagacgaacggagaaagtttataaagagtccctgagagttattctctcaggggtttttcattacacagaaacagcatcaataatataagtgtcggcgtgcaaatctgacatttcagccggcacagtccagcatgtcaattgatagtctcctttaggcagatcaaaggacagtcttttagacatgatgctttcaatatgaattccgttttctgtgacatgaaaaggaacagtcacttttttttcgtaggagcttactgtttctgaactgttcaggcgcaaaagaataaaggcctttgtatttcgctgtgcctcaaaggaaatggctccgtctgccgcagcatatcctttttcaatcgcttcgtcagtccaatccattacaggaggtgtagaatccttttgaaatacagtaaattgatgatatgaaatcgaaagttcttgcggcttccatgatttgatcaatgtgctgttcctcctctatgtactgtttactgaattgtgaataaaacctttgtgccgtctgggtaatcggtaagctgatgcccgacccaagagcctgctccgcggttgtcagcgggagaaatgtattctacagaagctccctcaccgccttctttgcacatggccattggccattcatctctgtcatacccctttttggaaggtacgtcctttaatgattgctcgcggcgttcctcagctccgtctctgtcaatagtgcacacctctgagtgcccctcatttatcgcatccttaatatgcttggcagtttcgggataacggtcagaaggaaaggtgattgtttcatcatattctttcgtttgagacgttttttgatcagctgagaaaaagtctccttttatcaggccgacagctgcagctgctatgatgacgatgacgagaagtatcgtttttatgatgtccgtcgtgatgttcacctcccgcttttaaaactgacacaagagtaatccagaaagcatttggtgtaaaggtttaaattttatgttttacgatcagtttattgcagaaatcgtaattttagcagatcgaaatatttgttttcagcaaaatacgattgccaatttacaataatgatagtaagtcatcagccgttttcggcttgattaatcattttaaattggcttatgataccggtaagctcctcagctaattgagaaagtgtttcagaagctgcggtaatctcctccattgcagcaaattgctcctctgttaatgcagccgcttgccgggtatttttagtagattctttaatgtcggccgtattggctgcaaaggaatcatttatttgatgtgcactggctgaaatgtttgttacagatgctgataaatcactaatctcggcgctgatttcacctgttgcagctgcaatttccttaaatgcatctctggtgcgctggatcatggtgactccttctgcagcttctgttttcacatgctcaacagatcttgcagaccggttcatatccttttgtatttctatgatcagttttgaaatctgccccgcagactgttgagactcttctgctaatttccgtacttcatcagcaacaacagcaaagccttttccttgttcaccggctctggcagcttcaatcgctgcattcagcgcaagcaggtttgtctgatcagcaatttgggtgatgaccgataaaatttgctcaatttgtttagagcggccgtctaactggtgtatgatttctccgcttttctgaattgactggtgaatcgcatccatttgcgcctgtacatttgcaatttccttttgtccaatgtctgcttttgattgagcgagctgccctttgtcagcgatagcggcagtatttgcagaaatatcccggatgtctgctgaagcttgttttaatgagctttcactattttcaattcgggtgatctgatcttgggctccatttgcaatctgctgtacagcttctgtgattttttctgaagcttgatttgtttcctctgctccggctgagagctgctgagaggctgacgcaagctgaagggctgattgttgtacggtttgtatggtatcgttcagcttcattctcatcttattataatagacgcttagttctgaaagctcgtcaccggttttgtctgacacctctattgtcatatctccgtttccggcactttcaaaggcgctttttaaagcgttcagccgcttgttgatttttctggtgaaaaccaaaacaaggatgactgatactataatgacgataacaagaacgatagcgaattgagtgaaaagtgattgtgtaagtgatgctaaaatactttgattagctccggtatacagcatgccgatgatgttgccattttgatcttttaacggcatgtatgcagtctgataagaagaacctgctacatctgcttgtccgtaaaaacgctttcctttctttaaaacagcggcaataacttcagaagaagcctgggtgccgacagctctttcgccattcttcatgacattggttgcaacacgagtatcgccttggaaaatggtaatggtatcacctgtcttttcaccaagcagatcaacaatatcttcatttccattgatttgtgtttgccctttatagagcttattgtttttcacctgccagtcgcctgacatgacatcatcaatataagtgctgcttaaagcgagatcacctttcgctttttcagttgccatttgtttcatgttttctgtaatttccttaagcatcacagtgccaactgatgccgaaaacaaaagaatcaccacgaaaacgaggcaaagaattttagttcctagcttcatcttaaatcgttttatcaacataattcctccctttacgatttgcaggtcatattacttatcgggtttttgggtttaaagttttattttagaaaaaataaaaccgacctgatcttcaggccggttgtgtgatgctattcaaggtttgcgtggtgagtgaacatagtttcagaatcgagtccttttttctccatgagttttaaaatcactgcatcatagaatagcagcaaagtttgttcaaataatgatcccattggctgaatggttttatagcttccgtttgactggtctttaggagaaccaggcattctgatgatgaggtccgcttgttttccgatgcttgattccggattgatggttaaagcggcaacaattccgtgtaagctttttgcttttgctgcggtatgaatcaagctttttgtctcgcctgatcctgagccgataataactagatctcctttggcgagcggcggagtgagaatctcacctacaatatgggcgttgaagcccatgtgcatcagtctcatcgcgaaggattttgccatcaggccagaccgccccgcacccgcggtgaaaatttggtgggatgaaagaatgtgatcggcaagctggtcagcttcttcattagaaatataagctactgaattgtgtaactcattgagaatttccgctacgtattcagtcgttttcataggagttatccttggacaatcagctgcttcatttttgaagctgtttccgccttatcagctgcgcttgtaattccgcccccaacaatgacaaggtcagggttttgcttgatcacttctggcagtgtatcaagtttgatgccgcccgcgattgcggtttttgcgttttttacggtatttttgattgtcgttaattcttcgaaagagtttttgccctctgcttgaagatcatagccagtgtggacgcagatgtagtcaacgcctagtgcgtcaatttctttcgcacgggattcgatatctttcacgttaatcatgtccactaagattttcttcttttgttttttggcttcttctactgcgcctttaatcgttgcatcgtctgtagcccctaaaacggtgatgatgtcagcgcctgcttccgacgctttcataatttcgtagcctccggcatccatgattttcaggtctgcaagaaccttcaattgaggaaatgcttcttttatttctttaacggctcttaggccttcattgatgacgaccggtgttccgatttcaactacgtcgatgtattgttctacctctttgacgagctcaatggcttccgggatgttgacgaggtctaatgcaagctgtaattccattgttgattcactccctttttcgaattatttttcattctataggttctcttatttgatgagaagtaggcactttgaagtcaacaagttacttggaggatactgtgaggagagacaatcagatttctttcgcttgattttatgagtgagtataatgaaaaaagagtctgcaaaaaagtaagtaagtgatgatacgtatctaacatacaaaaagattactaaggggggattctattgagccggatggacgacaaaaggtttaattgtgagaaggaattaacgcttgcagtgattggcggtaaatggaagatgctcattttatggcatttaggaaaagaaggcacaaaacggttcaatgaattaaaaacattgattcctgatattacgcagaagatcctcgtgaatcagctgagagaacttgagcaggatatgattgttcacagggaagtgtatccggttgtcccgccgaaggttgagtattctctgaccccgcatggagaaagcctcatgcctattcttgaagccatgtatgagtgggggaaaggctatatggaattgattgatatcgacaaaaatgtcatgaaagaatcgttgtaagacgctcttcgcaagggtgtcttttttttgcctttttttcggtttttgcgcggtacacatagtcatgtaaagattgtaaattgcattcagcaataaaaaaaaattgaacgcagcagtttggtttaaaaatttttatttttctgtaaataatgtttagtggaaatgattgcggcatcccgcaaaaatatccctgtaaataaactggaatctttcggcatcccgcatgaaacttttcacccatttttcggtgataaaaacatttttttcatttaaagtgaacggtagtaagataaaaaatattgaaaacaatgaataaatagccaaaattgtttcctgttaggataggggttcttgcggtctttatccgcttatgttaaacgccgcaatactgactgacggctgcccgttttaatagcggcaatctgttttttgtttggaagcactgctttttaagtgtagtactttgggctatttcggttgttagttcataagaattaaaagctggtatggataaaaaagagaaaatgctctgcacaagttcactgtttatgaagactaggggaggtatgaaaatatggaaataactttttatcctttaacggatgcacaaaaacgaatttggtatacagaaaaattctatcctcacacgagcatttcaaaccttgcggggattggtaagctggtttcagctgatgcgattgattatgtgcttgttgagcaggcgattcaagagtttattcgcagaaatgacgccatgcgccttcggttgcggctagatgaaaacggggagcctgtacaatatattagcgagtatcggcctgttgatataaaacatactgacactactgaagatccgaatgcgatagagtttatttcacaatggagccgggaggaaacgaaaaaacctttgccgttgtacgattgtgatttgttccgtttttccttgttcaccataaaggaaaatgaagtatggttttacgcaaatgttcatcacgtgatttctgatggtatctccatgaatattctcgggaatgcgatcatgcacatttatttagaattagccagcggctcagaggcaaaagaaggaatctcgcattcatttatcgatcatgttttatctgaacaggactatgctcaatcgaagcgatttgaaaaggacaaggcgttttggaacaagcaatttgaatcggtgcctgaacttgtttccctgaaacggaatgcttccgcaggaggaagtttagatgctgagaggttctctaaagatgtgcctgaagcgcttcatcagcagattctgtcgttttgtgaggcgaataaagtcagtgttctttcggtatttcaatcgttgctcgccgcctacttgtacagggtcagcggccagaatgatgttgtgacgggaacctttatgggcaaccggacaaatgcgaaagagaagcagatgcttggcatgtttgtttctacggttccgcttcggacaaacattgacggcgggcaggcgtttttagaatttgtcaaagaccggatgaaggatctcatgaagacactccgccaccaaaagtacccgtataatctcctgatcaacgatttgcgtgaaacaaagagctctctgaccaagctgtttactgtttctcttgaatatcaagtgatgcagtggcagaaagaagaggatcttgcctttttgactgagccgattttcagcggcagcggattaaatgatgtctcaattcatgtaaaggatcgatgggatactgggaaactcaccatagattttgattaccgcactgatttattttctcgtgaagaaatcaacatgatttgtgagcgcatgattaccatgctggagaacgcgttaacgcatccagagcataccattgatgaattaacgatgatttctgatgcggagaaagagaagctgcttgcgagggccggcggtaaatctgtgagctaccgtaaggacatgacgatcccggaactgttccaagaaaaggctgagcagctttcagatcatccagcggttgtattcgaagatcgtacattgtcctatcgaacgttacatgaacaatccgcacgcatcgccaatgtgctgaaacagaaaggggttggcccggacagtcctgtcgcggttttgattgaacgttctgaacggatgattacagctatcatgggaattttaaaagccggcggagcctatgtgccgattgatccgggttttcctgcagagcggattcaatatattttggaggactgcggggcggacttcatcctgactgaatcgaaggttgcagcgcctgaagccgatgctgagctgattgacttagatcaggcaattgcggaaggtgcagacgatatgacggaggctgatgtaaacgcgcggaatcttgcctacattatttacacatcgggaacaaccggacgtccgaaaggcgttatgatcgagcatcgccaggttcatcatttggttgaatctctgcagcagacgatttaccaaagcggcagccaaaccctgcggatggcattgcttgcgccgttccactttgatgcgtcagtgaagcagatcttcgcgtcgcttcttttgggacaaaccctttatatcgtaccgaagaaaacagtgacgaacgggaccgcccttgctacatattatcggagaaacagcattgaggcgacggatggaacaccggctcatttgcaaatgctggcagcagcgggcgattttgaaggcctaaaactgaagcacatgctgatcggaggagaaggcctgtcatctgttgttgcggacaagctgctgaagctgtttaaagaagccggcacagcgccgcgtttgactaatgtgtacgggccgactgaaacgtgcgttgacgcgtctgttcatccggttatccctgagaatgcagttaaatcagcgtatgtgccgatcgggaaagcgctggggaataaccgcttatatattttggatcaaaaaggccggctgcagcctgaaggcgtggcgggtgagctttatatcgcgggagacggtgtgggccgaggctatttgcatttgcctgaattaacggaagagaagtttttacaagatccattcgtgccgggcgatcgcatgtaccggaccggggacgtggtgcgctggcttccagatggaacaatcgaatatttaggcagagaggatgaccaggtcaaagtccgcggataccggattgagcttggggaaattgaagccgtgattcagcaggcgccagacgttgcaaaagccgttgttttggcacgccctgacgaacagggaaatcttgaggtttgcgcatatgttgtgcagaagcctggaagcgaatttgcgccagccggcttgagggagcatgcggccagacagcttcctgactatatggtgccggcttactttacagaagtgacagaaattccgcttacgccaagcggcaaagtcgaccgccgcaagctgtttgcactagaggtgaaggctgtcagcggcactgcctatacagcgccgcgaaatgagactgaaaaagcaatcgcagccatttggcaggacgtgctgaacgttgagaaggcggggatttttgacaatttctttgaaacgggcgggcattcattgaaggccatgacccttttaacaaagattcataaggaaacaggcatcgagattccgcttcaatttttgtttgagcatccgacgattgcggctcttgcagaggaagctgatcacagagaaagccgggcattttcggtgattgaacctgctgaaaaacaggagcattatccgctttctctggcacagcagcgaacatatatcgtcagccagttcgaggatgcgggagtcggctacaacatgcctgcggcagcaattctggaagggcctttagatattcaaaaactggagcgcgcatttcaggggttaatccgacgccacgagtcattgagaacatcatttgttcttgaaaacagcacgccgagacagaacattcacgatagcgttgatttcaacatcgaaatgattgaaagaggcggccgctcagatgaggcaattatggcttcattcgttcggacatttgatttggcgaaagctccgctgttcagaatcggtttgctggggcttgaagagaaccgtcatatactgctgtttgatatgcaccatttgatttctgacggtgtatccattggcattatgctggaggagttagcacgcatttataaaggcgaacagcttcctgagcttcgtctccagtataaggactacgctgtatggcaaagcagacaggctgctgaagggtacaagaaggaccaggcttattggaaggaagtctttgcaggcgagctcccggtgcttcagcttctgtccgattacccaagaccgcctgttcaaagctttgaaggggatcgggtgtcaatcaagctggatgcgggggtaaaggatcgcctcaatcgtttggctgaacaaaacggcgccactttatatatggtgatgctgtccgcttactatacgcttttgtcaaagtatacggggcaggatgacatcattgtcgggacaccgtcagcgggcagaaatcactccgatacagagggcattatcgggatgtttgtcaatacgcttgcgattcgcagtgaggtgaagcaagatgagacgtttacccaattgatctcgcgtgtccgcaaacgggtgctgaatgccttttctcatcaggactatccgtttgagtggcttgttgaagatttgaacatcccgcgtgatgttagcaggcatccgctgtttgacacgatgttcagccttcaaaacgcgacagcaggcattccggctgtcggcgatctgtccttgtctgttcatgagaccaatttcaagattgccaaatttgatttgaccgtgcaggcgagagaaaccgatgaaggcattgagcttgatttggattacagcacaaagctgtttaaacaaagcacggcaaacaggctgcttacgcattttgcgcgtttgcttgaagatgctgcggctgatccagagaagccgatttctgagtataagcttctttctgaagaggaggccgcttcgcaaattcagcagtttaacccgggcagaacaccttatccgaaagataaaacaattgttcagctgtttgaggagcaagcggcgaatacgccagaccatactgcgcttcaatatgaaggcgaatcactcacttatcgtgaactgaatgaacgggccaatcgtttagcccgcggcattctttctcttggagctggcgaaggcagaactgcggctgtcttatgcgagcggtcaatggatatgattgtgtcgatcttggcagtattaaaatcaggttcggcttatgttccgattgatccggaacatccgagtcagcggatgcagcatttcttccgtgacagcggagcaaaggtgcttctcactcagagaaaattaaaggctttagcggaagaagcggaatttaagggcgttatcgtgctagccgatgaggaagagagctatcatgccgatgcgcgcaatctcgcactgcctcttgattctgaagcaatggccaacctgacgtatacctctggaacgactggaacacctaaggggaatatcgtgacacatgccaatattctccgcacggtgaaggaaacgaattatctcagcattacagaacaggatacgattctcggtctttccaattacgtgtttgacgcgtttatgttcgatatgttcggatctttgttaaacggagccaagctggtgctgataccgaaggaaaccgttttggacatggctcgtctgtcccgcgtcattgaacgggagaatatcagcattctcatgattacaaccgctttgttccacttgcttgtggacttgaatccggcgtgcttgtcaacgcttcgcaagattatgtttggcggggaacgggcttcggttgagcatgtcagaaaagctttgcaaacggttggaaagggcaagctccttcacatgtatggaccgtctgaaagcacggttttcgcgacgtatcatccggttgatgaattggaggagcacacgctgtctgttccgattggaaaaccggtcagcaatacggaagtatacattcttgacagtacgggacacgtgcagcctgccgggattgccggagagctttgcgtcagtggcgaaggactcgtgaaaggctattacaaccgtccagaactgactgaggagaaatttgttccccatccgtttacatccggcgaacgcatgtataaaacgggagaccttgctagatggctgccgaatggcgacatcgaatttatcgggcgaatcgaccatcaggtgaagattcgcggacagcgcatcgaacttggagaaatcgaacatcagctgcaaacccatgatcgtgttcaggaaagtgttgtgcttgccgttgatcaaggagcgggagataaactgttgtgtgcttattatgtcggagagggagacatctcatcacaagagatgagagagcatgctgcgaaggacttgccggcatatatggttcctgcggtgtttatccaaatggacgagctgccgctgacagggaacggaaaaattgaccggagagcgctgccgattcctgatgccaacgtttcaagaggtgtttcatatgttgcgccacgcaatggaacggaacaaaaagtcgcagacatttgggcacatgtgcttcaggcagaacaagtcggcgtttatgaccacttctttgacattggcggacattcattagcaggcatgaagatgcttgccttggttcatcaggaactgggcgttgagctgtcactcaaggatctcttccagtcaccgacggttgagggcttggcacaggtgattgcctctgctgaaaaagggacagccgcaagtatcagcccggcagagaaacaagatacgtatcctgtttcttcaccgcaaaaacggatgtacgtgcttcagcagcttgaggatgcgcaaacgagctataacatgccggcggttctgcgcctgacaggtgagcttgatgttgaaaggcttaacagcgtcatgcagcagttaatgcagcgtcatgaagccttgagaaccacgtttgaaataaaagatggagaaacggtgcagcggatctgggaagaggctgagtgtgagatagcctatttcgaagccccggaagaagagacagagcggatcgtttctgagtttattaagcctttcaaaatcgaccaacttccactgttcagaatagggcttatcaagcattcagacactgagcatgtgctgctgttcgatatgcatcatattatttctgatggtgcatctgtcggtgtgctgattgaggagctttcaaagctgtacgacggagaaacccttgagccgctccgtattcaatataaggattatgctgtgtggcagcagcagttcattcagtctgagctttacaagaagcaagaagagcattggctgaaggagctggacggagagctgccggtgctgacgcttccgaccgattacagtcggcctgccgttcaaacatttgagggagaccgcattgcattttcattagaagcaggcaaagctgatgctctgcgcaggcttgcaaaagaaacggattccacgctttacatggtgcttctggcttcatacagtgcatttttatcaaaacttagcgggcaagacgatatcatcgtcggttcacctgtggccggacgatctcaagcggacgtcagccgcgtcatcggaatgttcgtcaatacattggcgctgcgcacgtatccgaagggtgaaaagacgtttgctgactatcttaacgaagtgaaagaaacggcactcagcgcttttgatgcgcaggattacccacttgaggatttgatcggaaatgttcaggttcagcgtgacacaagcagaaatccgttattcgatgcagttttttcaatgcaaaatgcgaatataaaggatttaacaatgaaagggattcagcttgagccgcatccgtttgaacggaaaacagccaagtttgacctcacgctgacggctgacgaaaccgacggagagcttacattcgtactcgaatacaatacagctctgtttaagcaggaaacgattgaacgatggaagcaatattggatggagcttttagatgatgttactgggaacccgaaccagctgctttccagcctgtcactggtcaccgagacagaaaagcaagcgcttcttgaggcatggaagggcaaagcgctgcctgtgccgacagacaaaacggttcatcagctattcgaagagactgtccagcgccacaaagaccgcccggctgtcacatacaacggccagtcttggacgtacggcgagctgaatgcgaaggcgaaccgtctcgcgcggattctgatggactgcggcattagcccggatgaccgcgtcggcattctcacgaagccgtcgcttgaaatgtccgccgcggtgctcggcgtcttgaaagccggagcggcgtttgtgccgattgatcctgactacccggatcagcggattgagtatattttacaggacagcggcgcgaagcttctcttgaaacaggaagggatttcagtgccggacagctttacgggagatgtcattcttctcgatggaagccgcacgattctaagcctgccgcttgatgaaaacgacgagggaaatccagaaaccgctgtaaccgcggagaacttggcgtacatgatttacacgtctggaacgaccggacagccgaagggtgtcatggtcgagcaccatgcgcttgtgaacctgtgcttctggcaccacgacgcgttcagcatgacagcggaggaccgcagtgcgaagtacgcgggctttgggttcgacgcttccatttgggagatgttcccgacctggacgatcggtgccgagcttcacgtcattgatgaagcgatccgcctcgatatcgtccgcctgaacgattattttgaaacgaacggcgtaacgatcacgttcctgccgacacagcttgcggaacagttcatggagcttgagaacacatcacttcgcgtattgctcattggaggagacaagctgaagcgcgcagtgaaaaagccgtacacactcgtcaacaactacgggccgacagagaatacggtcgttgccacaagcgcagaaatccatccggaggaaggctcgctttccatcggaagggccattgccaatacgagagtatacattctcggcgagggcaatcaggtgcagccggaaggcgtagccggagagctttgcgtggcggggcgcggactggcacgcggctatctgaatcgagaagacgaaaccgcgaagcggtttgtcgctgatccgtttgtgcctggtgagcgcatgtaccgcaccggcgatttggtgaaatggacgggcggcggcatcgaatacatcggccggatcgaccagcaggtcaaggtccgcggctaccggatcgagctctcagaaattgaagtccagctcgcacagctttctgaggtgcaggatgcggcggtgacagctgtcaaagataaaggaggcaacacagcgatcgcggcgtatgtcacaccggaaacagctgacatagaagcactgaaatcagcactaaaggaaaccctgccggattacatgatcccggcgttctgggtgacgctggacgagcttccggttacggcaaacggcaaagtggaccgtaaagccttgcctgagccggacatcgaagcgggaagcggagaatacaaagcgcctacgaccgacatggaagagctgcttgccggcatctggcaggacgtgcttggaatgtctgaagtcggtgtcaccgacaatttcttctcgcttggcggagattccatcaaaggaattcaaatggcgagccgcttgaaccagcacggctggaagctggaaatgaaagatctcttccagcacccgacgatcgaagagctcacccagtacgtagagcgtgccgaaggcaaacaggcagaccaaggcccggtagagggcgaagtcatcctgacgccgatccagcgctggttctttgaaaagaacttcacgaacaagcaccactggaaccaatcggtgatgcttcacgccgcgaagggctttgaccctgaacgggtggagaaaacattgcaggcgctgatcgagcatcatgacgcgctccgtatggtctatcgtgagggactggaagacgtcattcaatacaacagaggtcttgaagctgcttccgctcaattggaggtcatccagattgagggccaagctgcagattacgaagaccgtatagagagagaagcggagcgtttgcaaagcagcatcgacttgcaggaaggcggcttgttaaaagcaggattgttccaagcggaagacggagaccacttgcttcttgccattcaccacttagtggttgacggcgtgtcgtggcggattttactggaggatttcgccgcggtatatacacagcttgagcaaggcaatgaaccggttctcccgcagaaaacacattcatttgcagagtatgcagagagattgcaagacttcgcgaactccaaagcctttttgaaagaaaaagagtattggagacagctcgaagaacaagctgtcgcggcaaagcttccgaaagaccgcgaatctggtgatcagcgaatgaaacatacaaagacaattgaattctcgctgactgctgaagagacagaacagctcaccacaaaggtgcatgaggcatatcacacagaaatgaatgatattttgctgacggcattcggattggcaatgaaggagtggacgggtcaagatcgagtaagtgttcatttagaggggcatggacgtgaagaaatcatagaagacctgaccatttctcgcacagtcggctggtttacaagtatgtacccaatggtgctcgatatgaagcatgcggatgatctgggctaccagctgaagcaaatgaaagaagatatcagacatgtgccgaataagggagtcggatacggcattctgcgctatctgacggcacccgaacataaagaagatgtggcgttctcgattcagccggatgtcagcttcaactatttaggtcagtttgacgaaatgtcggatgcaggtttgtttacgagatcagagctgccatcaggacagtcattaagccctgaaacagaaaaaccgaatgcgctggatgttgtcggatatatcgaaaacggaaaactgacgatgtcactggcctatcattctcttgaatttcatgaaaaaacagtacaaacattcagtgacagctttaaagcgcatcttctcagaatcattgaacattgcctatctcaagacggtacggaactgaccccgagtgatcttggtgacgacgatttgacgctggatgagctggataaattaatggaaattttctaatagaggtggcatatgagcaaaaaatcgattcaaaaggtgtacgcactgacaccgatgcaggagggaatgctgtatcatgcgatgcttgatccgcattcttcctcgtacttcacacaattagagcttgggattcacggcgcttttgatcttgaaatctttgagaaaagcgtcaatgaactgattcggtcatacgatattctccgtacggtatttgtgcatcagcagctgcaaaaaccgcgtcaggtcgtgttagcggaacgcaaaacaaaggtgcattatgaggatatcagtcatgcagacgagaaccgccagaaagagcacattgagcgttacaaacaagacgttcagcgccaaggctttaacctggcaaaagacatattgttcaaggtagcggttttccgccttgatgcagatcagctgtatcttgtctggagcaatcatcatattatgatggacggctggagcatgggcgtcctcatgaaaagcctgttccaaaactatgaagcgctcagagcaggaaggacacctgcaaacggtcaaggcaagccttactccgactacatcaaatggcttggaaaacaggacaatgaagaagcggagagctactggagcgagcgcttggcgggttttgaacagcccagcgtgctcccgggccgcctgcctgtaaaaaaagacgaatacgtcaataaagaatattcctttacatgggacgaaacactggttgcccgcattcagaaaaccgcaaaccttcatcaagtgacagggcctaacctatttcaggccgtttgggggattgttctcagcaaatacaactttacggatgatgttgtcttcggaacggtcgtctcaggaaggccgtctgaaatcaatggaattgaaacgatggcggggctgtttatcaacaccattccagtgcgggtgaaagttgaacgagatgctgcattcgctgatattttcacagctgttcagcagcatgcagtagaggcagagcgttacgattacgtgccgctctatgagattcaaaaacgctcagctcttgatggcaatctcttaaaccatcttgtcgcgtttgaaaattatccgcttgatcaagagcttgaaaacggcagcatggaagaccgcctcgggttttcgattaaggtagaaagcgcatttgaacaaacgagcttcgatttcaacctgattgtgtatccgggcaaaacgtggaccgtcaaaattaaatataacggagccgcctttgattccgcttttatcgaacggacagcggagcaccttacccgcatgatggaagcagctgtcgatcagccggccgcttttgtgcgtgagtacgggcttgtgggagacgaagagcagcggcaaattgtcgaggtgtttaacagcacgaaagccgaactccctgcaggaatggctgttcaccaagtgtttgaagagcaagcgaaacggacgccggcgagcactgccgtcgtatatgaaggaaccgtgctgacgtaccgcgagctgaatgcagcggctaaccgtctggcgagaaagcttgtcgaacaaggccttcaaaaaggggaaacagcagcgattatgaacgatcgatcagtagaaaccgttgtcggcatgctggctgtgttaaaagcaggcgccgcatatgtgccgcttgatccagcgcttccgggggatcgtcttcgtttcatggcagaggacagctccgttcgaatggttttgaccggaaattcttatacagggcaggcacatcagctgcaggtgccggttcttacactggacataggcattgaagatggcgaagctgacaatctcaacctgccatccgccccgtctgatttggcgtacatcatgtacacatccggttcaacgggcaaaccgaaaggcgtcatgatcgaacataaaagcattctgcgcctcgtcaaaaatgccgggtacgttcctgttactgaagaggaccgcatggcgcaaacaggggcagtcagctttgatgccggaacgtttgaggtattcggcgcactgctgaatggcgcagcgctttatccggtcaaaaaagagacactgcttgatgcgaaacaatttgctgcattcctgcgtgagcaaagcatcacaactatgtggctgacatcacctttattcaaccagcttgctgcaaaggatgcgggtatgttcggcacactgcgccatttaatcatcggcggagatgcccttgtcccgcatattgtcagcaaagtaaaacaggcatcgccgtcgctttcattgtggaacggatacggcccgacagaaaacacgacgttttcaaccagttttctgatcgaccgcgagtatggcggctctatcccaatcgggaagccgatcggaaattccactgcctatattatggatgagcagcaatgcctgcagccaatcggcgcgcctggtgagctttgcgtaggcggaatcggtgtagcgcgtgggtatgtcaatctccctgagctgacggagaagcaatttctggaagacccgttcagaccgggtgagagaatttaccgcactggtgacttggcaagatggctgccggacggcaatatcgaatttttaggcagaatcgacaaccaagtgaaggtgcgcggcttccgaattgagcttggcgaaattgaaacaaaactgaacatggctgagcatgtgacagaagccgcggtgatcatccgcaagaacaaagcagacgaaaatgaaatttgcgcgtacttcacggcggatcgtgaagtggctgtgagtgagctgagaaaaacactgtctcagtctttgcctgactatatggtccctgcccacctgattcaaatggacagcctgccgctcacgccaaacgggaaaatcaacaaaaaggaactgcctgcaccgcaatcagaagccgtgcagccggaatacgcagcaccaaaaacagagagtgaaaagaaattagcggagatctgggaaggaatactcggcgtcaaagcaggcgttaccgataacttctttatgatcggcggccattctttgaaagcgatgatgatgacggcgaaaattcaagagcattttcataaggaagttccgataaaagtgctttttgaaaagccgactattcaagaactggcactgtatttggaagagaacgaaagcaaggaggagcagacgtttgaaccgatcaggcaagcatcttatcagcagcattatcctgtatccccggcccagcggagaatgtatatcctcaatcagcttggacaagcaaacacaagctacaacgtccccgctgtacttctgctggagggagaagtagataaagaccggcttgaaaacgcgattcagcaattaatcaaccggcacgaaatcctccgtacatcgtttgacatgatcgacggagaggttgtgcaaaccgttcataaaaacatatcgttccagctggaggctgccaagggacgggaagaagacgcggaagagataatcaaagcatttgttcagccgtttgaattaaactgcgcgccgctcgtccgttcgaagcttgtccagctggaagaaaaacgccacctactgctcattgatatgcatcatattattactgacggcagttcaacaggcattctaatcggtgatcttgccaaaatatatcaaggcgctgatctggaactgctacaaattcactataaagattacgcagtttggcacaaagaacaaactaattatcaaaaagatgaggaatactggctcgatgtctttaaaggcgaactgccaatactggatcttcccgcggatttcgagcggccagctgaacggagctttgcgggagagcgcgtgatgtttgggcttgataagcaaatcacggctcaaatcaaatcgctcatggcagaaacagatacgacgatgtacatgtttttgctggcggcgttcaatgtactcctttccaagtacgcgtcacaggatgatatcattgttggctcgccgacagctggcagaacacatcctgatctgcaaggtgtgccgggtatgtttgtcaacacggtggcactcagaacggcaccagcgggagataaaaccttcgcgcaattccttgaagaggtcaaaacagccagccttcaagcattcgagcaccagagctatccgcttgaggagctgattgaaaagcttccgcttacaagggatacaagcagaagtccgctgttcagcgtgatgttcaacatgcagaatatggagattccttcattaagattaggagatttgaagatttcctcgtattccatgcttcatcatgttgcgaaatttgatctttccttggaagcggtcgagcgtgaagaggatatcggcctaagctttgactatgcgactgccttgtttaaggacgagacgatccgccgctggagccgccactttgtcaatatcatcaaagcggccgcggctaatccgaacgttcggctgtctgatgtagatctgctttcatctgcagaaacggctgctttgctagaagaaagacatatgactcaaattaccgaagcaacctttgcagctctttttgaaaaacaggcccagcaaacacctgaccaccctgcggtgaaggctggcggaaatctgctgacctatcgcgagcttgatgaacaggcgaaccagctagcgcatcatcttcgtgcccaaggggccggaaatgaagacattgtcgcgattgttatggaccggtcagctgaagtcatggtatccattctcggtgtcatgaaggcgggggcagctttccttccgattgatcctgatacacccgaagaacgaatccgttattcattagaggacagcggagcaaaatttgcggtcgtgaatgaaagaaacatgacggctattgggcaatatgaagggacaatcgtcagccttgatgacggtaaatggagaaatgaaagcaaggagcgcccatcatccatttccgggtctcgcaatcttgcatacgtcatttatacgtccggtacgaccggaaagccaaagggcgtgcagattgagcatcgcaatctgacaaactatgtctcttggtttagtgaagaggcgagcctgacggaaaatgataagactgtattgctttcatcttacgcatttgaccttggctatacgagcatgttccccgtacttctgggcgggggcgagctccatatcgtccagaaggaaacctatacggcgccggatgaaatagcgcactatatcaaggagcatgggatcacttatatcaaactgacaccgtctctcttccatacaatagtgaacaccgccagttttgcaaaagatgcgaaatttgaatccttgcgcttgatcgtcttgggaggagaaaaaatcatcccgactgatgttctcgccttccgtaagatgtatggacataccgaatttatcaatcactacggcccgacagaagcaacgatcggcgccatcgccgggcgggttgatctgtctgagccggatgcatttgcgaaacgcccgacaatcggacgcccgattgcgaatgccggcgcgcttgtcttaaatgaagcattgaagcttgtgccgccgggagcgagcggacagctctatatcacgggacaggggcttgcgagagggtatctcaacaggcctcagctgacagccgagagatttgtagaaaatccatattcgccgggaagcctcatgtacaaaaccggagatgtcgtacgaagactttctgacggtacgcttgcatttatcggccgggctgatgatcaggtgaaaatccgcggctaccgcattgagccgaaagaaattgaaacggtcatgctcagcctcagcggaattcaagaagcggttgtactagcggtttccgagggcggtcttcaagagctttgcgcgtattatacgtcggatcaagctattgaaaaagcagagctccggaagcagctttccctaacactgccgtctcatatgattcctgctttctttgtgcaggttgacgcgattccgctgacggcaaacggaaaaaccgacagaaacgctttgccaaagccgaacgcggcacaatccggtggcaaagccttggccgcaccggagacagcgcttgaagaaagcttatgccgcatttggcagaaaacgcttggcatagaagccatcggcattgacgacaattttttcgatttaggcggccattcattaaaagggatgatgctgattgccaacattcaggcggaattggagaaaagcgtaccgcttaaagcactgttcgagcagccgactgttcgccagctggcggcttatatggaggcgtctgctgtttcaggcggccatcaagtcctcaaaccggctgacaagcaggatatgtatccattgtcatccgcacagaaacggatgtacgtgctcaatcagcttgaccgccagacgataagctacaacatgccatctgttcttctaatggaaggagagcttgatatttcgtgcctgcgcgattcactcaatcagcttgtgaaccgtcacgaatcattgcggacgtcatttatggaagctaatggtgagcctgttcagcgcatcattgagaaggcggaggttgatcttcatgtgtttgaagccaaagaagacgaagcggaccaaaagattaaggaatttatccggccattcgacttaaacgacgcaccgctcattcgcgcagctttgcttcgaatagaagcgaaaaaacatttgctgcttttagatatgcatcatatcatcgcagacggcgtctcaagaggcatttttgtaaaagaattggcgctgctttacaaaggagagcagcttccggagccggcgcttcattataaagatttcgccgtttggcaacatgaagctgagcaaaaagaacggatgaaggagcatgaggcgtactggatgtcagttctttcaggcgagctgccagagcttgatctcccgctcgattacgcccgtccgcctgtgcaaagctttaaaggagatacgatccgtttccgtacgggaagtgagacggcaaaggcggtagaaaaactgcttgcggaaaccggaacgaccttgcacatggtgctccatgctgttttccacgtctttttaagcaaaatttccggacagcgggatatcgtcatcggctccgttactgccggccggacgaatgctgatgttcaggacatgccgggaatgttcgtcaatacacttgccctgagaatggaagcgaaagaacagcaaacatttgcggagcttttggagcaagcaaagcagacgaacctgtcagcgcttgagcatcaggagtatccgtttgaagatctggttaatcagcttgatctccctcgggatatgagccgaaacccattgtttaatgtgatggtgacgacagaaaaccctgataaagaacagcttacattgcaaaatctgagcatttcaccttatgaggctcatcagggaacttctaagtttgatctgacactgggcggatttactgatgaaaatggcattggcttgcagctcgaatatgcgacagatctgttcgcgaaagaaacagctgaaaaatggagcgaatacgttctgcggctactaaaggctgttgcggataacccgaaccagccgctttccagcctgtcactggtcaccgagacagaaaaacaagcacttcttgaggcatggaagggcaaagcgctgcctgtgccgacagacaaaacggttcatcagctattcgaagagactgtccagcgccacaaagaccgcccggctgtcacatacaacggccagtcttggacgtacggtgagctgaatgcgaaggcgaatcgtctcgcgcggattctgatggactgcggcatcagcccggatgaccgcgtcggcattctcacgaagccgtcgcttgaaatgtccgccgcggtgctcggcgtcttgaaagccggagcggcgtttgtgccgattgatcctgactacccggatcagcggattgagtatattttacaggacagcggcgcgaagcttctcttgaaacaggaaggcatttcagtgccggacagctttacgggagatgtcattcttctcgacggaagccgcacgattctaagcctgccgcttgatgaaaacgacgagggaaatccagaaaccgctgtaaccgcggagaacttggcgtacatgatttacacgtctggaacgaccggacagccgaagggtgtcatggttgagcaccatgcgcttgtgaacctgtgcttctggcaccacgacgcgttcagcatgacagcggaggaccgcagtgcgaagtacgcgggctttgggttcgacgcttccatttgggagatgttcccgacttggacgatcggcgctgagcttcacgtcattgatgaagcgatccgcctcgatatcgtccgcctgaacgattattttgaaacgaacggcgtaacgatcacgttcctgccgacacagcttgcggaacagttcatggagcttgagaacacatcacttcgcgtcctcttgaccggaggagacaagctgaagcgcgcagtgaaaaagccgtacacactcgtcaataactacgggccgacagaaaatacggtcgttgccacaagcgcagaaatccatccggaggaaggctcgctttccatcggaagggccattgccaatacgagagtatacattctcggcgagggcaatcaggtgcagccggaaggcgtagccggagagctttgcgtggcggggcgcggactggcacgaggctatctgaatcgagaagacgaaaccgcgaagcggtttgtcgctgatccgtttgtgccgggtgagcgcatgtaccgcaccggcgatttggtgaaatggacgggcagcggcatcgaatacatcggccggatcgaccagcaggtcaaggtccgcggctaccggatcgagctttcagaaattgaagtccagctcgcccagctttctgaggtgcaggatgcggcggtgacagctgtcaaggataaaggcggcaatacagcaatcgcggcgtatgtcacaccggaaacagctgacatagaagcactaaaatcagcactaaaggaaaccctgccggattacatgatcccggcgttctgggtgacgctgaacgagcttccggttacggcaaacggcaaagtggaccgcaaagccttgcctgagccggacatcgaagcgggaagcggagaatacaaagcgccgacgaccgacatggaagagctgcttgccggcatctggcaggacgtgcttggaatgtctgaagtcggtgtcaccgacaatttcttctcgcttggcggagattccatcaaaggaattcaaatggcgagccgcttgaatcagcacggctggaggctggaaatgaaagatctcttccagcatccgacgatcgaagagcttacccaatatgtagagcgtgccgaaggcaaacaggcagaccaaggcccggtagagggcgaagtcatcctgacgccgatccagcgctggttctttgaaaagaacttcacgaacaagcaccactggaaccaatcggtgatgcttcacgccgcgaagggctttgaccctgaacgggtggagaaaacattgcaggcgctgatcgagcatcatgacgcgctccgcatggtctaccgcgaggaaaacggggacatcgttcaggtgtataaaccgatcggtgagagcaaggtcagcttcgaaatcgtggatctgtacggctccgatgaagagatgctgagaagccagattaagcttctcgcgaacaagctgcaaagcagtctcgatctgcgaaacgggccgcttttaaaggcggagcaatatcgcacagaagctggggatcacctgctcattgctgtacaccatctcgtggtcgacggtgtgtcatggcggattttgcttgaagactttgcttcaggctacatgcaggctgagaaagaagagagccttgtcttcccgcaaaaaacaaactccttcaaggattgggcggaagaactggcggcattcagccaatcagcgcatcttttacagcaggctgaatactggtcgcaaattgccgctgaacaggtttctcctttaccaaaggattgtgaaacagagcagcggatcgtcaaggatacatcatccgtcctatgtgaattaacggaagaagacactaagcatcttttaacagatgttcatcagccatatggaactgaaatcaacgatattcttctcagcgcgctcggtttgacaatgaaagaatggacaaagggggccaaaattggcattaaccttgagggacacggccgggaggacatcatcccgaatgtgaatatctccagaacggtcggctggtttacggcacaataccctgttgtgctcgacatgtctgaagcagatgcctcagctgtgatcaaaacagtcaaagaaaacctgcgccgcattccggacaaaggtgttggctacggcattcttcgttatttcacagaaacagcggaaacaaagggcttcacaccggagatcagcttcaactatttgggccaattcgacagtgaagtcaaaaccgatttctttgaaccgtccgctttcgatatggggcgccaagtaagcggagaatcagaggcgctgtacgcattaagcttcagcggcatgatcagaaacggccggtttgtgctttcctgctcctacaatgagaaggagtttgaaagagctacagtcgaggagcaaatggaacggtttaaagaaaacctcctgatgctaatccgccattgcacggaaaaagaagacaaggaattcacaccaagcgacttcagcgccgaagaccttgaaatggacgagatgggagatatctttgacatgcttgaggagaatttaaaataaaacgcaagggaattacagaaggcgggagcgaaacatatgagtcaatttagcaaggatcaggttcaagatatgtattacctatcgccgatgcaggaagggatgctttttcatgccatcctgaatcccggccaaagcttttaccttgaacaaatcacgatgaaagtaaaaggtagcttgaatatcaaatgtcttgaagaaagcatgaatgtgatcatggaccggtacgatgtatttcgtaccgtgttcattcacgaaaaagtaaaaaggcctgtccaagtcgtattgaaaaaacggcagttccaaatagaagaaatcgatctgacacacttaacgggcagcgagcaaacagccaaaatcaatgagtacaaagaacaggataagatcaggggttttgatttgacgcgggatattccgatgcgggcagccattttcaagaaagctgaagaaagctttgaatgggtgtggagctaccaccacattattttggacggatggtgcttcggcatcgtcgtacaggatctatttaaggtatacaatgctctgcgcgaacaaaagccgtacagcctgcccccgtcaaaccgtataaagactacatcaagtggcttgaaaagcaggataaacaagcatcactgcgttactggcgcgagtatttagaggactttgaaggacaaacgacgtttgcggagcaaagaaagaaacaaaaggacggctatgagccgaaagagctgctcttttcactgccggaggcggaaacaaaggcctttaccgagcttgcaaaatcgcagcataccactttaagtacggcgctgcaggcagtctggagcgtattgatcagccgctatcagcagtctggcgatttggccttcggtacagttgtttcagggcgtcccgcggaaatcaaaggcgttgaacatatggtcgggctgtttatcaacgttgtcccgagacgtgtgaagctgtctgagggtatcacatttaacggcttgctcaagcagctgcaggagcaatcgctgcagtctgagccgcaccaatatgtgccgctttatgacatccaaagccaggccgatcagccgaaactgattgaccacatcattgtttttgagaactatccgcttcaggatgcgaaaaatgaagaaagcagtgaaaacggctttgatatggtggatgttcatgtttttgagaagtcgaattatgatctcaacctgatggcttcccctggagatgagatgctgattaagcttgcctataatgagaatgtgtttgatgaggcgtttatcctgcgcttgaaatctcagcttctcacagcaattcagcagctcatccagaatcctgatcagcctgtcagcacgatcaacctcgttgacgacagggagagagaatttttgctaaccggcttaaacccgccggctcaagctcatgaaacaaagcctctgacggattggttcaaggaagcagtgaacgtcaatccggatgcgccggcgcttacgtattccggccagaccctgtcttatcgcgaattagatgaggaagcgaaccgccttgcacgccggctgcaaaaacacggtgcgggcaaaggctctgttgtagcgctgtacacgaagcgctcacttgaactggtaatcggcattctcggtgtattaaaggcgggagcagcctatctgccggttgatccgaagctgccagaggaccgaatctcgtatatgctggctgacagtgcggcagcctgtcttctgacgcatcagaagatgaaagaacaagcggctgagctgccgtatacaggcacaacgctcttcattgatgatcaaacacggtttgaagaacaggcaagcgatcctgcaaccgcgattgatcctaatgatccggcatatatcatgtacacgtccggcacaaccggaaagccaaagggcaatatcaccactcatgccaatattcaaggattggtcaagcatgtagactacatggcattctctgagaaagatacattcttatctgtttccaattacgcctttgacgcatttacctttgatttctatgcttctatgctgaatgcggcacggctcattatcgcagatgaacatacgctgcttgatacagaacggctcacagatctgatcctgcaagagaatgtcaatgtcatgtttgcgacaaccgcactatttaatcttctcacggatgcgggagaggattggatgaagggactacgctgtatattattcggcggagagcgcgcgtcagtgcctcatgtcagaaaagcgctgcgggtcatggggccgggcaagctgattaactgctacgggccgactgagggaacagtgtttgcgactgctcacgtcgtgcatgatataccggattccatctcctcattgccgatcggaaagccgatcagcaatgccagtgtttatattctgaacgagcaaagccagctccagccattcggggcgatcggtgaactgtgcatcagcggaatgggcgtgtcaaaaggatatgtaaatcgtgctgacctcacgaaggaaaagtttattaagaacccgttcaagccgggagaaacgctttaccgcacaggggatttagcgcgctggctgccggatggaacgattgaatacgccggccgtattgacgaccaggtcaaaatacgtggacaccggattgagcttgaagaaatcgaaaagcagctgcaggaatacccaggtgtgaaagatgcggtcgttgtggcggaccgccctgagtctggcgatgcatcaatcaatgcctaccttgtgaaccgaacgcagctttcagctgaagacgtgaaggcgcacctgaaaaaacagcttcctgcttacatggtgccgcaaacctttaccttcttggatgagcttcctttaacgacgaacgggaaagtcaataaacggctgctcccaaaacctgatcaggatcagctggcggaagaatggattggaccgcggaacgagatggaagaaacaatcgcacaaatatggtctgaggttctcggcagaaagcaaattggcattcatgacgatttctttgcgctcggagggcattccttgaaggccatgaccgccgcgtcccgcatcaagaaagagctcgggattgatcttccagtaaagcttttgtttgaagcgccgacgatcgccggcatttcagcgtatttgaaaaacgggggccctgatggcttgcaggatgtaacgataatgaatcaggatcaggagcagatcattttcgcattcccgccggtcttgggctatggccttatgtaccaaaatctgtccagccgcttgccgtcatacaagctgtgcgcctttgattttattgaggaggaagaccggcttgaccgctatgcggatttgatccagaagctgcagccggaagggcctttaacattgtttgggtattcagcgggatgcagcctggcgtttgaagctgcgaaaaagcttgaggaacaaggccgtattgttcagcggatcatcatggtcgattcctataaaaaacaaggtgtcagtgatctggacggacgcacggttgaaagtgatgtcgaagcgttgatgaatgtcaatcgggacaatgaagcgctcaacagcgaagccgtcaaacaaggcctcaagcaaaaaacacatgccttttactcatactacgtcaatctgatcagcacaggccaggtgaaagcagatattgatctgctgacttccggcgctgattttgacatgccggaatggcttgcatcatgggaagaagctacaacaggtgcttaccgtatgaaaagaggcttcggaacacacgcagaaatgctgcagggcgaaacgctagataggaatgccgggattttgctcgaatttcttaatacacaaaccgtaacggtttcataaatgaagtgatgaaaggaggagacagccaatgagccaactcttcaaatcatttgatgcgtcggaaaaaacacagctcatctgttttccgtttgccggcggctattcggcgtcgtttcgccctctccatgcttttttgcagggggagtgcgagatgctcgctgccgagccgccgggacacggcacgaatcaaacgtcagccattgaggatctcgaagagctgacggatttgtacaagcaagaactgaaccttcgccctgatcggccgtttgtgctgttcggacacagtatgggcggaatgatcaccttcaggctggcacaaaagcttgagcgtgaaggcatctttccgcaggcggttatcatttctgcaatccagccgcctcatattcagcggaagaaagtgtcccacctgcctgatgatcagtttctcgatcatattatccaattaggcggaatgcccgcagagcttgttgaaaataaggaggtcatgtcctttttcctgccttctttccgatcagattaccgggctcttgaacaatttgagctttacgatctggcccagattcagtcgcctgttcatgtctttaacgggcttgatgataaaaaatgcatacgagatgcggaaggctggaagaagtgggcaaaagacatcacattccatcaatttgacggcgggcacatgttcctgctgtcacaaacggaagaagtcgcagaacggatttttgcgatcttgaatcagcatccgatcattcaaccgtgatcaaaagcggacagcttcggctgttccgctttttttgtgttgaatgccaatttttgcatggtataatagtcgaaatactcaaataaaggcaggtcgaaacatgcgcacgtctcccaggatgaaatggtttgtattgctgtttacgtttgttttcgccatcggaatgaactcattcagaaattcctttcaattttttatgctgccaatggcagatgccttccatgccgacaggtcgctgatctcggtttctgtcagcatttttatgatcacaaccggcatcgtccagttttttgtcggtttttttatcgaccgtttcagtgtcagaaaaattatggcgctgggagctgtctgcatcagcgcaagctttttggtgcttccttattcaccgaatgttcatgtgttttccgccatttacggtgtgcttggcggaatcggctattcctgcgcggtcggcgtgacgacccagtacttcatcagccgttggtttgacacacataaaggtctggcgcttgctattttgaccaatgccaactctgcgggcctgctgcttctctcgcccatttgggctgcggctccgtatcatgccggctggcagagcacctataccattttgggaatcgtcatggcggctgttctgctgccgctcctcgtctttgggatgaagcacccgccacatgcgcaagcggaaactgtgaaaaaatcttatgattggcgagggttttggaacgtgatgaagcaatcccgcctcattcatatcctgtacttcggcgtgtttacttgcggatttacaatgggaattattgatgctcacctcgtcccgatactgaaggatgcgcatgtctctcatgtcaacggaatgatggccgcgttcggggcatttatcatcattggcggattattggcgggctggctgtcagatctcctcggcagcagaagcgtcatgctatccatcttatttttcattcggctgctcagcctcatttgcctgctcattcccattctcggaattcatcacagcgacctttggtacttcgggtttatcctgttattcgggctcagttacacaggcgtgatcccgctgaccgcggcgtcaatttcggaaagctatcaaacaggattgatcggatcgctgttaggcatcaatttctttatccatcaggttgccggagctcttagcgtgtatgcgggcggtttgttttttgacatgactcatggttatttgctgattgtcgctgtgtgcatcgtgtttgtgggtttatcggctgtaatagagctggtgccgtttttagataaacagaaggcaaaagaaacccaccattcaatataaaaggatcagcactgtcaatgctgatcctttttaaatttgagtttttttgtttcggtatttttaaggataatctccttgaatctgttcatctcctcttcggagtgaaaaaaatgtttggggatcgcaatatattggccacttgatgtattgaccctgaagatatttttatattcgaaaacagctgtaatttcatcccaattgaaaatgaggtcatattttttagaacatatacgaattccttcttggttcagagtatatgttcttttagatttcatccgttcgttcttcttgtatgctctggaaaacttcacatatagaagaaggaggagcagcagtgtaaacagaacggacatcacgataatcaacatactgttcataaacaagttaagcgcgtcactgccataaacgatacggggccatccgttaatgaagttaactgcagcaaatatggtgcaaaacaacagaaagtaaaagcatgatatttttgcgatttgataaaaaaagatttctcttacatccttaaaagcgatttctcctggaagattgatactttcactagcatattgaatcatacggtaaacctacacctctaaccatgtttttcctttcagtctagcataatttctcatttttttgcaggcataccagggcgctttgtttttttctccagattgatattgctccccaccacgccaatcataatacaaacagccccggcaagatgataccaggccaggctttcgttgagaatcataactcctgcaatcatcgtcacaatggtagatacatgattaaaagcactcattttaaacgcctcaattcgcgacagcgtatagttagacagaaatgaagtgacaagtgaagacagcacgcccaaatacacaatggcgagaacgaagccgggctcccggaacggcagaaaataagtgccgactgttcccgccgctccgtgacgcacaagggcgatggcgttgaagacgacaaagccgatggctgacatgatgtaggtgagctcggtcagcttgaaccgctgcgtcatttttctggcagcagtattgtacatcgctgaggacaaagcggacaataggatcagcaaagacccttttaagctggctgattccacgtcaacgcctttcatcacaaaaataaacatgacgccggcaacggataaaaccgtgaaccccttttgggtccacgttgggcgttcctttaaaacataagcggcaaagaccatcgtgaaaatcggaatggctgcctgaataattcccgcttcagaggaggacgagtacacaaggccaaatgcctgaaagctgaaaaataacgcgggatacagcagggcgagcggcaaaatggcaatgacgtcctttacgcggattgatagctttacccagccgaataagatcggtacagtggccgcagcaaacgcaatggtgaaccgatgcgccaaaatatcaaacggctctgctgtttgcagtgcgatttttacgaatagaaaggataaaccgataatgaacgaatataaaatagccgctatataagcgggggcttgctgatgtttaaccataatgggaatggctcctttacctgaattgcagcgccggtcgctccctttattgtatggccgcggtcagaacggtacaatgagaaaaacaatgaactgtaccggtacaaaacagggggagaaggcatggagaaatatatgagtctattaacgaagatagaggagatgatgcaaagcaccgcctatcaagaaggagacaggcttccatctatccgtcagctgtccgcccgctaccaagtcagcaaaagcacagtgatccgcgcgctgcaggagctggaaaaacgccaccttatctattccgttccgaaaagcggctattatattgtgaaaaagacgggaaaagccaaaagcgggcagcagggtcccattgactttgccacatctgcgccggatccagatgtgtttccgtatcttgattttcagcactgcatcaacaaagcgattgatacatacaaaaacgatttgtttatttatgggacgccaaaggggcttccatcactcatccgcgtactccgaaagctcttggccactcaacaggtatttgcggatgaacggcatattttcattacatcaggtgtccagcaggcgttatccttgctttgtgccatgccgttcccaaatgggaaagagaagatcgccattgaacagccgggctaccatttgatggtcgaacagcttgagacgcttgggattcccgccatcggggtgaaacgaacggaagaagggcttgatatagccgaggttgagcggttatttcaaacagaatcgattaaatttttttatacgatgccccgcttccataacccgcttggctgctctttgtcagagcgtgataaacaggagcttgtgagactggcagaagcgtatgatgtctacctcgttgaggatgattacctcggtgatctggaggaaaataaaaaggcagatccgctgtacgcatatgatctgtcctcacatgtcatctatttgaaaagcttctcgaaaatgatgttccccggccttcgcgtgggggcggctgttttgcccgaagcgctgactgacacgttctatgcgtacaaaaagctgaacgacatcgactgttcgatgatttctcaagcggcattggagatttacctgaaaagcggtatgtacggcaggcataaggagaaaatcagaaattcttataaagagcggtcgctgaggctacatcaagccattcaaacacacaggcagctgggaagcggacgctttacgttctccagcgggcaggcaccctgtatgcacacccatctggtgcttcctcaggatctgcccgcctcaagagtgattcatagactggaaaaacaaggggttctccttgtggcgatagaccgtcattatttatcagattatccgaaagaaaatctattaaaaatcaatatttccaatgtgaaaacggaagatattgagcgcggtgtcaagctgttgatgagccatttataaaagctcttcgtacgagaccattgtgatatcctcggggaaatcagggtgtgcggcgcatacagccattttgtagccgggatcgacctcatacgttttgatatagcatggggaatggctgtccggaagctcaatggatacttgtccgtcctggtgcaggcgcactgaaaaggaatcaagcggaagcgataagcctttgccttcctgtttgataaagctttctttcattgaccatagatgataaaaatagtctgtctgctcgtccttgtcttttgctaaaaggtcgctgtactctgtttttgaaaagaagcgcttggcgatctcaaggctgatcggtttcgttttttcgatatctatgccgatcggctgtgaatcaaacgcgcaaatgacccagcgtccggagtgagaaatgttgaaatgagcgtcgggaagatcagggatgcacggcttcccgtattcctgcgtgctaaagcggatatcggatttgtccaactgatactgcctgcttatgactgagcgaacgagcacatctcccagcagggtgcggtgagcatcttctttatgataaaatctccggcatttctcccgtttttcaggtgctatgaaagacatgaaccgttcattttcttcctgtgaaagcgggcggtccatataaattccgtaaatcttcattctagatcctccgtctgcaaaagattgtcaaaaccatcctatcatacttccacaagactcatatagaggagaaaataaaaaaacaaagccaaggcggctttgttttagtggacaggcggagatgctttcacagcggctgtccgccttgccacagcataattcagcagctggattgactgcggcaatgaaaaacgcagaatgagcccggtgaggatggcggtcaaaatggtgccaaaaccgatcggcccacccatgccccatgccgcaaacaaaatggttaattccatgccgttccgcacccattgcacattccagccggttttttctgtaatcagcatcatcagtgaatcacgcggccccgcgccaaggcctgctgatacataaacaccgacgccgtaaccgatcagcaccacgccgagagagaagacgatgatcgagcctgtgtaggtcgagggggcaggcagaatgaaattgaaaaaatctataaatacaccaatgagcaccatattcaggagggccccaattttcggccaagctctcgtaaacaatgacgtgaatccgacgatgagcgctccaataatgatggaccactggccgacggtaagcccgaagtgctgaaacaggctgtaatgaaatgcatcccacggactaatgccgagtgcttttccttctatcgtcagggatacaccaaaagccaaaatgatcaaaccggcaaaataaaatgtccagcgcagaacaagttcttgcttcacgtgaggtcccttctttcgtaaaaatcagtcgattgtcattgtagcacatctgacagaagggcggaataggcgaaaggggctcaacaaaaaaacagggccgccgcaggcgccctgtttcagcgtgttggtaaacccttgcattcgttgtcaggcctgtgcttcggtgctcacgaatttaacattcgctgtgctccaatgctcgcccttcctagacttcaaaggttttcaatcacgctgaaaatcacaaaatcctaaaacgaatatcgttttaggattttgtcaataatctgaaacagggcgcgggcgccctgtttttcttattacagcgggttcaaaatccggttcaagaaccgctgtgtccgttcttcttttggtgcggagaaaatttgctccggcggtccttgctccacgataacgccgccgtcgatgaagatgacttcatccgcaacctcctgcgcgaacttgatttcgtgggtcacgacgaccatggtccagccttcattggccaagtccttgataaccttcagcacctctccgacaagctcgggatcaagcgctgaggtcggttcgtcaaacagcatgagctcaggctgaatcgccagtgcgcgggcgatgccgacgcgctgctgctgtccgccggaaagctggaacggatataaatccattttgtccttcaatccgactttatcaagaagctgaatcgcttcttttctgacttcctctttgttccgtttttgcacctgaacagggccctccatcacgttttcgagggctgtgcggtgcgggaacaggtgatacgcctgaaacaccattccggattttcggcgaagctttaggatatccgcctgtttcacctttttggagaaatcgatggagaaatcatcaaatgcaagctctccgcgattcgggatctccagagcgttcaggcagcggagcagcgtcgttttccctgaacctgaaggcccaagtatggcgatgacttttcctttttcaatcttcatatctatcttttttaaaatttcattttcaccgaatgatttgtttaatcctttaacggtaagcatactcggaacctccttatttggccacgtagcggtcaagacgccgttcgatgacatgctggacgagtgagagcaggaagcagataatccaataaataaaggctgcttcaatatagatcactaaaatttgatcaagattccgcgcgccgatttcctgggcttttctgaacagctcagcgaccagaatttgagaggcgagggatgtatctttaatcaggctgataaaggtattggataatggcgggatcgacacacgaaacgcctgcggcaaaatgacgcggaacagcgttttttgatgtgtcatgccaattgtgtagccggcttcccattgccctttcggcacggataaaatagatgctcgaatgatttcagatgcataggcgccgacgtttaatgaaaaggcgataactgcgcttggaaatggatctaatgtgacgttaaaggccgggaacagatagaaaatgatgaacaattgaacgagaagaggagtgccgcgtattgcggatacgtatacgctgaacacccatctcaaaggtctcactttcgacattctggcaagcgccgtaatcagcgccaggatcattccgaatataaaggaaagaatcgtaaggggaatcgtatagtagattccccctgaaagtatcggccagaatgactgctgcaccagatcccacgggatcgccgtgccaagcgtcaatgccggcagattatttagaaacatcttcgccgaaccattttttagaaattttagaaagagtcccgtcctctttcatttcttttaatgctttgttgacttgatcaacaacctcgccgcttcctttacggaacgtgaaatatgttgactgaggctcacctgtttcaaacgcgattttcacgtttttattgccagatgtttttaagtagttcaatacggcaagcttatcgttgtatgtcatatcgacgcggccttgctggatcatttgaagggcctgcgccataccttcaacgccttctactttagcgccggcatttgtagctaatttgttgtagttgcttgtcagtgattgagctgacgtttttccttttacatctgcttcagacttaatatcgttgttgtcttttttcgttacgacaacggctcttgatgttgtgtatttatctgagaaatcatattgattttcacgatctgtttttccgacttggttggcaacaacgtcaaaccgtttggaattcaggccggcaaacatactgtcccactgtgtttccttaaagtcgactttaagcccgaggcgttttgcgacttctgtgataacttcgacatcatagccagtcagtttatcagtgtctttgtcgtggtaagtgaacggctcatatgttccttccgttccgactgtgagcacaccttttttcttaattgaagcccaaagatcgccatctttggcattatcttttgactgattgtcatttcctgctccgcaagctgcaagagctgcaatacttacgaccatgaataaagccaataatgcttttttcatcttattccccacttttctggttgattttattgaaataaaaaaatagcttacaaatctaaaggataacttttttttagtatgagtcaagtaattggttttcataaggcaaaatcttttaaaataaatccaaaaattgctgtgccggtttaggcaaataactgtccgttctccacatgacagccggtgtcataatgaagggattattttcgatatgaacggtgcgaacgtgatttctcatatgaacgggaatcattgtgacgggcaaaatagacgcgccgaatccggatgacacgaggctgagcaaagttgcagagtcgtggcattcacaaacaatgcgcggctccaggttcaaacgatgaaattcattcatgacctgattataaacgccttttccgttgacaggccgcagcaggatcagcggaaatgaaggaatgtcctccatcttaatggtgtctccgcacggatatccggcttcatctgaaagcacgagcacacatggaatgtcatcaagctgtttgaattgtactgtgtcacttttgatcagtgttgtcgtgaccgccgcatcgatttgccggctttccagcagctccaacagtgtcgcgggttcattttcccaaatattaaaggtgagatgggggtatctctctttgatctgtgttactttttcaagcatcagagccgcgcaataaatcgttgatcccacggcaagtgtgccggctacttcctccttcagctcctgtacctcaatgactgcatcttcaaacctatgcagaatctcttttgctctttttagaaaaacagctccttcatatgtaagagtcatttgttttttcttgttacggtcaaacagaacaacaccaagttcgtcctccagctgtttgagctgcctgcttaaaggcggctgcgccatgtgaagctttttggctgcggacgtaattttctgttcttgggcaatggtaatgaagtatcgaagctggcgaatatccaaaagaaagcgcctccttatcataccttttaggtattaaatatagatttaatagatatttttcatatggatatatcaggagtatgattgaaatgaaagcagaattcaagcgtaaaggagggggcaaagtgaaactcgttgtcggaatgacaggggcaacaggggccattttcggggtcaggctgctacagtggctgaaggccgccggagtggaaacccatctcgttgtgtctccttgggcaaacgtcacgatcaaacacgaaacaggctataccttacaagaagtagaacaactggccacatacacttactcacataaggatcaggcggcagccatttcaagcgggtcgtttgataccgatggaatgattgttgcgccgtgcagcatgaagtctctcgcaagcattcgcaccggaatggcggataatctgctgacacgtgcggcggatgtcatgctcaaggagagaaaaaaactcgtcctcttaacgagagagacgcctttgaaccaaattcatctcgaaaatatgctagcgcttacgaaaatgggcaccatcattcttcctccgatgccggcattttataatcagccgagaagcttagaggaaatggttgaccatattgtttttagaacgttggaccaattcggcattcggcttcctgaagcgaagcgctggaatgggattgaaaaacaaaaaggaggagcttgatcatggcttatcaagatttcagagaatttctcgctgcccttgaaaaagaaggacagctgcttacagtgaatgaagaggtaaagccggaaccggatttaggggccgccgcacgggcagccagcaatcttggcgataaaagccctgcgctcttatttaacaacatttacggctatcataacgcgcgaattgcgatgaatgtcatcggctcttggccaaaccatgccatgatgctgggcatgccgaaagacacaccggtaaaagaacagttttttgaattcgcaaagcgttatgaccagtttccgatgccggtcaaacgtgaggaaacagcgccatttcatgaaaatgaaatcacagaagatatcaatttgttcgatatactgcctcttttcagaattaaccagggtgatggaggctactatttagacaaagcatgtgtcatttcccgtgatcttgaggaccctgacaacttcggcaaacaaaatgtcggcatttacagaatgcaggtcaaaggaaaagaccgtctcggcattcagcctgtcccgcagcacgatattgcaatccatctgcgccaagctgaagaacgcggcatcaatcttccggtcaccattgcgctcggctgtgagccggtcattacaacggcggcatcgactccgcttctctatgatcaatcagaatacgaaatggcaggcgcgattcaaggcgaaccatatcgcatcgtcaaatcaaagctgtctgatcttgatgttccgtggggcgctgaagtggtgcttgaaggtgagattattgccggagagcgcgaatatgaagggccgttcggtgaattcacaggccattattccggcggacgcagcatgccgattatcaaaattaaacgcgtctatcacagaaacaatccgatctttgaacatttatacttaggcatgccttggacagaatgcgattacatgatcggcattaacacatgcgtgccgctttatcagcagttaaaagaagcgtacccgaacgaaattgtggcagtgaacgccatgtacacacacggtttaatcgcgattgtttccacaaaaacccgctatggcgggtttgcgaaagcggtcggcatgcgcgcactcacaacgccgcacggactcggctactgcaaaatggtcattgtcgttgatgaggatgtcgatccattcaaccttccgcaggtcatgtgggcgctttcgaccaaaatgcatccgaaacacgatgcggtcatcattccggacttatctgtcctgccgcttgatccgggatccaatccatcaggaatcactcacaaaatgattcttgacgccactacaccggttgcgccggaaacaagaggccattattcacagccgcttgattcgccgctaacaacgaaagaatgggaacaaaaactaatggacttaatgaataaataaggaaaggatgttcgaaatgcatacatgtcctcgatgcgactcaaaaaagggagaagtcatgagcaaatcgcctgtagaaggcgcatgggaagtttatcagtgccaaacatgcttttttacatggagatcctgtgaaccggaaagcattacaaatcccgaaaaatacaatccagcgtttaaaattgatccaaaggaaacagaaacagcaattgaagttccggcggtgccggaacgaaaggcttgatccgcgtgaactgtatgtcagaccgcctctttgagctgcttgacgggagctgcctgaatgagaagcagcatgaggccttcgttctgcaaacagtatcagaggatggctggccgcatgccgctatgatcagtgcaggtgaaattatcgcgctgagccgaattgatatccgaatcgctctgtggaaaaacacaatgacttcggccaacatccttcgcacaggaaaagcacagttcacggcgtggtggaagggagcggcctattatgtaaagcttgaatgcgcgcctttaccgcctttgaatgatgctgaatatgatagagaccgtttttcctgccgcatcgtttcagtgaaggaggacgttgcgaaatacgctgatttgacttcaggtgtccgtatacagcttcacagccctgaagaggtgctgagcagatgggaaaagaccctggaagatttaaagcggtaatatcgatagcctgacgccatgcgtcaggctttttttatataatgaaaacaaaagggggcgtgagaaatggaacgtgcggggatcagtcactcggacggctttgatttagcttatcgaattgagggcgagggcgcacccatccttgtgatcgggagtgcggtttactatccgcgccttttttcctcagatatcaaacagaaatatcaatgggtctttgtcgaccataggggatttgctaagcctaagcgggagcttcgtgcggaggattcgaggcttgatgccgtcttggctgatatcgaaaggatgagaacatttcttcagcttgaggatgttactatcctgggacattccgggcacgcttttatggctttagagtatgccaggacatatcccaaacaagttcggaaggtggcgctctttaatactgcgcctgataacagtgaagaaagacagcgaaaaagcgaatcatttttcatggaaacagccagccttgagagaaagaaacgatttgaaaaagacatcgcgaatttgccgcaggacatcgacaaagatcctgaaaggcgcttcgtgcacatgtgtattcgcgctgaagcgaaaagcttttatcaagagcggccgcatgctgctgccttatgggacggtgtattcacgaatatgccgatcattgatgaattatggggcaatacatttgcccggattgatcttattcagcggttagctgatgttcgtatgccggtgtatattggattagggagatatgattatttggttgcgcccgttgcgctatgggatgcagttgacggtttatatccccatgtggataaggttatttttgaaaggagcggccatcagccgatgctggaagaaccggaagcctttgatcaaagcttcagcaaatggctggatcaataaaaaaacagcccgcagatcaaaatccgcgggctgtttctgattataagacccctttcatcgcgcgtttgataaccggcgagagcagcaggagaatgccgccaagaacgatagaaatcaaaccgatggtgccgaagtacattgtttcaggaattttatcaaacaatccggctacttgggcattgatcgcttgtgctgctgcgttcgtcagaaaccacatactcattgtctgtgcagagaaggcagctggtgccagtttcgttgtcacggataaaccgactggagacaggcacagctctccaagcacgacaagcaggaagctgagaacgagccaaagcgggcttacgagtgcttcttttccttgcatagcagggaataccataatgataaatgacaatccggctaaaataattccgattgagaatttaactggtgtagacggctggcgtttgccaagcttcatccagagccatgcgaatattggcgcaaaaatgacgacaaacaatggatttaatgattggaaccatgatgactgaagttcgaatccgcccaatgaaagtcttatgcgttcatcagcgtataccgcaagaatggtcgctccctgttcctgaatggcccagaacatgacagcaccgataaacaaaggaacgtaagcggcaagacgggatttttctgttttgtccgcttttttgcttgtaaacatgatgatgaaataaatcacaggaatcaaaataccgagaatacttacaaggtcgataaaacgattgatcgtcagcacgcctgtttgtacagagataatcactgcgatcgccacgatgataacaccgattccggtgccaatcgcagattttttagacagcggattcggcacattggaacctgcaagcccgaggtttttctttcttgtcaaagcaaaaacgataagtccgagaagcattccgaccgcggcagctccgaagccgagatgatagttgtacttctgtccgagtgttccgacaattaacggcgcaagtaaaccaccgaggttaatccccatgtagaaaatactgaaacctgagtcgcggcgcgggtcttctttcgtgtaaagatccccaaccacgcttgaaacgtttggttttaataagcctgttccgacaatgataagcaccatgctgatatagaatgcgatcgcgctgcccggataggcgagtgcaatgtggccgaacataatgaatatgccgccgtaaaacacggtgtttgcggtaccgaatacccggtcagcgagccatccgccaataatggtggacatgtatacgagtgatccgtaaatcgacataatggcaaccgcagtgcccttgtcaaagccgagccctccgtttaccgtctctgtatacaaatagtaaagtaagattgctctcattccatagtaagagaaacgctcccaaaattcggtgaaaaatagtgtaaatagtcctcgcgggtgaccaaagaaccctttttgcgggacgcttttaatgatactttcgttatcaatcgaagccatgtcagccaaaccctttctaaaaaaagtgtattataaaaatcatattcttatataatacttgtgtcaatataatttatactcatttcaaatagttccatattggaaaaattataaatacctaaaaatagtgatttcctcctaatttttaaactttttatcgtgagattttcttacacaactattcctttatatttttttaataaaattttagagaaatgtacaagcagatcgggcctttgtgagtaacatgatagtaatcatagagaaggaggctcgcaattggctgaattcatattaaatgcagcggatttcggtgttcctggagatggtaaaacggattcgacagaacggattaatcagtgcctcagtacagctgtatcgaaaggctatcatactgtctggtttccaaagggaacatatttaatagacgcaacgcttggcggagatcttaatcagaggtttcgaaacgcggggatcattgttcccggcaaccttgagattatgatggaccccgaatgtatcatgaaagtgatcccgaatagttcgtggggttattccgcattttatgtgggcaagcaagagaatataaccatttccgggggacaaattatcggcgaacgggatgagcatacgtatgcctcggcagggataaggtcaacccatgaatggggctttggcatatgtattgaaggatgctcgaatgttgtcattgatgatgtgaaaatttctgattttaccggcgatgggatcatagtcagcccaaggggattaaagaccaatcaagattatcgaacgtcagagcaaattatcatccgccgctgtgaggttcggcggtcgaggagaaataacatttccattaccggatgtgacatggtcacggtggaggaatgcttgattgaagatgccggaacggggaatggaacagcgccgaaattcggaattgacattgaaggatatggcgaaggtgatgttgattatgaggaaccgattaatgtatcaattcgcaataaccactttgttggaaacgtttcaagttctgtgaccaattttaacgggtatggcattttaatagaaggaaatcactctgacaatacaatcagctacggatatgggacgcaaacagtgatcaagggcaatattctgagacgccctgaagacgcggcggctgcgccaagagtcgggataaccggactcggtgtatcacaaggaaaagagaccagtgatgcagtgatcgctggcaacctcattaccggattttcaactggaattgatgtcagaggaaagagcgttcttgtgacgaacaacaaaatcagcaactttgaaaacacagggatattggtttatcagtcttccgatgtaaaggtagacggaaaccaaattcaaaacggactgtctgaaacaaggcgcagcatcggtcttcgcgcagtgctgtcagatgacatcgcttttctgaataactgtctcattcaagtcgttgacggtgtgaacgtttccggcggaaatatgatcattaaagataatctcctgagaaaattcagccggggcatttggattgctcaagggaacgcggtgattgaagggaatacactgaatcctgacgcgtttgaagcagtgccggaatcatattctgtttccgtcacaaacaatgccggcgccatcatcaaaaacaatacatttaaagagttcaaaaattaccccatttattgctccacaagtgcaaaaacctcaattatcggcaaccacttagagcgatccccgcttttggtcaccatctatatcagcgcaggtgtgcatgagatttttgataataccatttcagtcaacagaacagccgggaatccgattgtgatttatctcaatggctctgcaggctctatcatctctggaaacaccatcaataacctctccgcgggcactgcgacagctattcaaacaaacacgtcaaccaattccaaaatcatcggcaaccgcatttttaaagggaccatcaacaaacacagcagtgatacaatagacggcaatatgattgtctgaaaaaagcgcccccctttaggggttcttttttttcgatttatagatcacgtacatttctctcacaagtactaacacaaaaaataaaagcacgacccattccgcaaatgttgtcatcttaaagctggacatattgttataaacggcttttgttaaactgaacccttgaagcatgtccatcaacacagaaatagctaataaacaaattaatatgactccggtcacgcccaatatcttcatgcttcatcatcctccgcttttagtgtctatctttggcggagaagttataccgcatctaaccctaatgcataatctcaattttaaaaggaagaatatgagaaaacgacaaggaaaggtatttgtgtatgcctttattttctaagcgaaagaacaataccgattcaaaagacaagcagaatacagacgaaaggaatcaggaacagcagcaagaaaaagaaaggccggttctcatttctccaagtttggcaaagaatatagcggaaacgaaaaaggaagtcggaagcagctctgacgtcatcattcgcgagattaaaatcggggagcaggatcatgtccacctagctgttatctatattgctgggctggtcgataataacacgatccatgagtcgttaattgacccattggtacaggatgagtctatccagaatactcatgcgatccagcaaattcttgaaaaaacgctcccgctgggcggggtgaaagcggaaaagagctgggacaagcttttttccgagttaatgctcggcaatgcgctcatttttgctgatggccatgatgaagctttgatttgcagcactcaagggggagagcagcgctccatccaagagccgagcacccaggtgtcattccgcggcccgcgccaagggtttacagagtctctgcaaaccaatatttccatgatccggcgatacattaaaaatccgaatttatgggttgaaaaaatgaaaaaaggttctgttacgaatacggatatcgctctcatgtacattcaaggaatatgcgatgaaaaggtgctgaaagaagtgaagcagcgcctggaaaaaatagatattgacagtattttggaatctggatatattgagcagctgattgaagatgaaacctttacgacgtttccgactatgtatcatacagaacgccctgatgttgtagcgggtaatctgttagaaggaagattcgcgattattgtggacggaacaccgtttgtgcttattgccccggccttatttgtccagttttttcagtctgttgaggattattattcgcgttttgacattgcgacaagcataagaattcttcgtgttttagtctttttcatttcgcttgtggctccggctgtatacgtggcagccacgacgtttcatcaagaaatgataccgactcagctgttagtggtcattgcggcccagcgggaaattgtcccgtttccggctgttgtggaggcgctgacgatggaggttgcttttgagattctgagggaagcgggagtcaggctgccccgggttgtcggctcggcagtgtcaatcgttggcgcgctcgtaatcggccaggctgccgtacaggctggtatcgtctctccggcaatggtgattatcgtggcactcaccgcgattgcgagcttcgcaacaccggcgtttgcaatggcgatttcagcccggcttattcggtttatctttattattgcctcagctgttatgggtttttacgggctgattttagggatcattatgatgtttgtccacttatgcagtcttcgttcattcggcgttccatatatgtcgccgcttgcacccttttcttcacaaggcgtaaaggacgcgcttttccgggttccgtggtgggccgatgaaaaaaggccggaatcggtcagcaaggaagataaggtgcggcaggggcaagatcaacgcccagagccggccgcttcacgaggaatggtgaacaaagatttggaagaaggggatcagaatggtacgtaaatgtctattagccgttctcatgcttttgagcgtcattgtgctgcccggctgctgggataagcgggagctgacggatcttgcgattatctcggcgattggcatcgatcggacaaacgacagcaactacgtgctgcatcttcaaattatcaatccaggaaatgttgccggcggccttcagggaggcggtgctggagacaggccgcctgtatctgtctattcaattgaaggcgacaatttgacggaagcactcagaaaagcctccatgaaggtatcgcggcggctttattttgcccataccaacctggtcgtaatcagcgaaaagctggcgaaagaggaagggctggattttgtattagacaatcttgaccgggacacggaattcaggacaacggcgaccttcgtcgttgcccataaaacaaaagcagaaaatatcgtgaaaatcctgacgcctattgataaaattccgtcaaacaaagtcaataaaaccctcgatttcacggaggcgcaatacggtcgggtggtcaaaaccaatattcaggacgttttgaaaacacttgccagcgacacaagggcaccgattattccgggttatttgatgattggcgatgataaaaaaggagtcagcatggaaaacacgcaggcaactgacccgaaagccattcttcaggcagacggattggcgatttttgacaaggctgggtatttaaagtattggattgaagatgatgaaagcgtgggggcagtctggcttatgaataaggtccagcatacgtttattaatgctgattggggcaagacgaaggatgcggtcagcttgcaggttacccatcaagatacaaagctggtacctgatatgcggaacggacgtccgcacatccatgtgaaagtgacggttgaaggaattatagatgctgtcaaataccctttccaattgtctaatccgaaggtgctggccgctattgaaaaagcgctcaacaaagagcttgaaaaggaaatcagccatactgtgaaaaagatcaagaagaataagatagattttgtcggttttggtgacacgatatatagaaagtatccggagcagtgggagaaaatgaaggacacttgggacaaagaatatttgccggaactgcccatcgatgtgaaggccgagacgtatatcagaaggacgggattgcgaaacaatccgatcaaacaccagtttaaagatgattaggtctgaagaaaggggaagtgacagatggaaaaagccagaataagcataaggcagctgtttgtcatgattatcatttttgaactgggcagctccttattgattacaccgggatcaatggcgggcagggatgcttggatcgcagttctgttggggtgtgcggccggtttgtttcttttctatttgtatcaaggaatttatcaatgttaccccaattcttctccgaaagaatatatggatgatatgctgggaaccaagctgagctggctgttttcatttctctatatcttgtactttgcctatattgccgcaagggtcctgcgtgactttggagaaatgctgctgacatttgcttatcatgatacacctatcattattgtaaatggtttattagtgatagtaagcatatacgctgtaagaaaaggaatcgaagtgctcgcccgcgcggctgagctacttttcggagccatgtatttactgggcgcgatcggcctcgtgctgattgttgtctcaggttctatagacccgcataacttaaaaccggttttggcaaacggtatctctcctgtcctttactcagttttcactcagaccatgtacgttccgtttggcgaagtcgttttatttgtgatgattttccctaacctgaatgacagaaaagatgtgaaaaaaatggggatgattgccatagctattagcggattggttgtggcgctcaccgtggcgattaatatcagcgtgcttgatgttgatcttacactcagatcccagttcccgcttttaagtacgattcagacaatcaaggtcgaagaatttttagaccggctcgatgtcttttttatgctggcgctgatcatcggcggcttctttaaggttagcctctacttatatgccactgtggttgggacatctacgctctttaaggaaaagaacccctctcaattggcttatccgatgggattgggcatcttaatcctttctataacgatcgcgactaacttttcagagcacttgaacgaaggcttgaaagtggtgccgctgtatattcatttgccttttcaattattgtttccgctctttctgtttattgtggctgtttggaaaaagaaacgaagagagaagtcaaaagggacaggagcaaaaaaatgataaaaagagcggggggatgcagccgccgctctttttatgttcacttctatataaaagggggatatagggtgcgcccctgtctgcactggcagaggcgcgttttgttatacgactgcgacgttttccttcacagtaaagcttcctcttgaaagtctgatattgatgtctgacacttttgcaatttgttcatcgtgcgtcaccataatgacgcatttatcttccttgtgcgccagatcctgaaagagccgtacgatctcttttgatgtgtcctcatcaaggtttccggtcggttcatcggctacgataagatccgtgtcacagcagaaagcccttgtaattgatacccgctgctgttgtccgccgctcagtgtgagtactttttgccgggcttgtttttcgttgatgccaaccttctgcagcatgtcaagcgcatatgattcgttgttcttttctttagaacctgtgatttccatagcggttgtgacgttctgcaaagccgtcatatacgggagcaggttgtacgcctgaaagacgattgatacatattgatttctgaaattggttaagccgattttagaaaccgcttttccgccgtaaaggatgtttccttcttttggtgcgtcaagtccgcctgccagagacaggaaagtggttttccccgtccctgatgtgccgacgattgtgtagaatttgcctttttgaaagccgatgttaatatcctgaaacaatggctggcttttgtctttataccagtagccgacttgttgaaattctaataagctcataggttccgcctctttctattcctgttttgtcaatatcgttttcggatgaagccgcagtactgaaattgacggcagcaatgttgcaatgattgcgattaggatgccgatcccgccaagaataagcatgtcgttcatagaaaccgcgacgttcagtgaatcgataacgtccacgtttgatgaactgtggccgaacattttgccgcccatgccgccgccgggcatttgtccgcttgcggtttgcgttgaatcggttgatgaactgatttgctgggataaaagctgatttccaagctgatttgcgacgagatttcccgtcacagatgcaaggccgatagcgataacggccacaatcagaatctcagtcaagaactgtccaatcaatttccatcgtttttcaccgatggccattaacacgcccatttcgtatttgcgctccctgattgacatcatgacaatcaggccaagaatgacggcgcctgccactgatacaagatacaccacgtttttagagaaagaagccacattttcaatcggtccgaccatttgctggtaaagctgatcgtttgtattcagtgtgtacgtatcgaagtcaattgatgttttcttcgctgcttttacgaaagcatccatatttttcgcgtcgtccatatagtaaacagctgagtcaatcgtatttttatagtcgtcgcctttcagcgccgctgttgctgtgtaaggcgtataaagcttgttataaggatttaagaaagagaaattttgggcttggtcatcaccagaagatgttgttttataaataccgacaatcttcagctttaccgtcgtatcttcatctgttgctgattcaattgtgatcgaatcgccaacgctcaaatcattttcttccgctaatgtttcgttgatcactgttacttttttgccgacatctgattttgtaatcgcgcgtccgtcagtgatttttgaatccccgtcagagaaatcatcaactaatgctgtgctgatgacaccttcaatcgaaagatcagcttgaaccatttgcggtccgccttgtcctccgccttgactgtttttagcgtttgagcttgaactgctggagctggaatcacttgaactagagctttcaatcgcatcaaagtttcccgcgttggctgaagctgatgtggtgtaattgtagctcttcacatgatcaagcgctgcaagcttattcgcatcagacactttgatcggtgtggattcgaagctgcgcttttcaccgctgtcctgctgtttttccatttgcttttggcggtcaacctgaagtgtcacgcttccgccgagttcctgtctggccagttcgcttgatttttgtgctgccgactggatggtaaggcctgatagaacaaagacacatatgactgtaaacacaaataattgcaataacgtttttccctttttagccttcatattccaaaaggcccgtttgataaagttcatttatgttcctccgtataggtttttttatggataagaccgcctctggggcgcgcccgctgataaattaatagtagtccaaaggtatgaaaaaaatatgaacaatctatttctagttgatgaaataaaaactaacaattgtgaaacgcaaaaccttctgtttaaaatggtgctattatataaaaaagcatcaaaacaaccggaggatataatgaaaatattaatgatagaagataatgttagtgtatgtacgatgacggagatgttcttttttaaagaaggttttgaagcggaattcgttcatgacgggttagaagggtaccagcgttttacggaagaaaattgggatctgatcattttggatatcatgcttccatctatggacggcgtgaccatctgcagaaaaataagagagacaagcacggtgccgattatcatgctgactgccaaagacactgaatcagatcaggtcatcggttttgagatgggggcggacgattatgtcacaaagccgttcagcccgctgacattggttgcccgcatcaaagccgtcatcagaagatataaggcgacaggcaaagcggttattgatgaagatatgattgaaacggaatgctttaccattaataagaagacgagagaagtattattaaacggagagcctgtagaaaatctcacgccgaaggaattcgatctgctttattaccttgtccaaaatccgcggcaggtgttctccagagaacagctgcttgagcaggtatggggctatcaattttatggagatgagcgaacggttgacgttcatatcaaacggctgcggaaaaagcttgccagcgaggacaagcctttcctgtatactgtgtggggagtagggtataaatttgatgaagattaaatatttatatcagctgctgctaagccatatcagcattttgattttagcgtttgtcattatcatttctctgttttcccactttgtgaaggaatttgcctatcagaacaaagtagaggaattgacgtcatatgcggtgcagattgcaaatgaattccaagccggccaggtggacatgcgcaggctctatccttatcaggacatgttaagcacaagaaagacgcagtttatcatctttaatgaagagcagcagccctattttcttcctgaaggctttcatcacccaccaagggaacagctgaagaagtcagaatggaataagctaaaaaaagggcagactgtcatgatcagggcagatggccgttttgatgatgaagtgtcacttgtggcgcagcctatatttgttcagaacgaatttaaaggcgccgttctgctgatttctccgatcagcggtgttgaacagatggtcaatcaggtcaacctctatatgttttatgctgtgatcagcacgcttgtgattacgattctcgtgagttggcttctgtccaaattccatgtcaagcggattcaaaagctgagagaagcgacagataaagtggcttccggcgattatgacatccatttggaaaacagctacggggacgaaatcggcgttctggcgtctgactttaatatcatggcgaaaaaactaaagcagtcaagggatgaaatcgatcgccttgagaagcggagaaggcagtttatcgctgacgtgtcacatgaattaaaaacaccgctgacgacgatcaacggtttggttgaagggttgaacagccatacgattcctgaggataagaaggataaatgcttctcgctgatcagtgaggaaacgaagcgcatgctgcggctcgtaaaagaaaatctggattatgaaaaaatcagatcccagcaaattacattgaacaagctagacgttcctctgatcgaggtgtttgaaatcgtgaaagagcacttgcagcagcaggcggaagaaaaacaaaacaagctgatgatccaagtagaggatcacgtcatcgtacatgccgattatgaccggttcattcaaattctcgtcaacattacgaaaaacagcatccaatttacgaaaaacggtgacatttggctgcgcggaatggaaggttataaagagacgattattgaaattgaagacacgggtatcggcattccaaaagaggatattgagcatatttgggagcgattctataaagcagatatttcaagaacgaacacggcatacggtgaatacggactcggtctctcgatcgtcaggcagctcgttgaaatgcaccagggcacagtagaaatccagagtgaagaagggaaaggcacaaagttcataatccgccttcctttaacggcaaaacagcaatagcatacagggcggcgcatcaattgatgcagccgccttttttgcacaccgcttcggtttattgcgtgctcccgaaaacaaagattgcgtgtttttcgggttgggacggtctataaacatgataaaatatgacataaacagtttttgatgggagagggtgaaggaatgaagagcggggtaattccttcttcagcggtcggtcaaaaaattaacgagtggtacagatatatccggacattcagcgtgccggatgccgaagtgttaaaagctgaaatccagcaggaactgaaacacatgcagcatgattccaacttgctgctttattattcactaatggaattccggcaccagcttatgctggattatcttgagccgttagagaaattaaatatcgaagaccagccaagcctgtctgaattatcaagaaacattgacagcaatcaggcagatctcaaagggctgctcgactattacgtgaatttttttcgcgggatgtatgagtttgataagcgggaatttatttctgccattacatactataaacaggcggagaaaaagctctcctttgtcgcagaccatattgaacgggctgaattctattttaaaatcgcggaagcttattattatatgaagcaaacgtatttttcattgattaatataaaaaacgcctatgaaatttacgtggagcaggaaacctataatgtgagaatcattcagtgccatttcgtgttcggggtcaacctgatggatgaaagaaatttcgaacaagccgcacgccatttcaaattggcgctcaatatggcccaagcggaacaaaaagcccagctggtcggaagagcatactacaatctcggattatgctattacaatcaagaccttctaggccctgccattgattactttgaaaaagcggtctccacgtttgaaagcagcaggatcgtcaattctctcccgcaagcctattttttaatcaccctgatttattataaacagggaaaacatgataaagcttcggaatatcacaagcggggctatgaatatgctaaagaaacagacgatgcagactatgccgtaaaattcgagtttttgcaatccctatatcaggatcagcccaatgaagaaggaatcgaacgatgtttccaatacttaaaaaataaaaatatgtacgctgatatagaggatttagccctagaagtagcaaaatattactatgaacagaaatggtttaaactgtctgcttcctactttctacaagttgaagaggcaagaaaacaaatacaaaggagtgaaggtttgtatgaaattgaaatctaagttgtttgttatttgtttggccgcagccgcgatttttacagcggctggcgtttctgctaatgcggaagcactcgactttcatgtgacagaaagaggaatgacgtaagaacaagccccttctcattagcgagaaggggtttttcttttcaaaaaaacaccgcaagacatagtcttgcggtgccgccttcatggagattacgtttatttagtagcctcctacaaatgcagttcccacaatgatcaagaggataaataacacaacaatcaaagcgaaagaagttccgtaacctgacattttgtgcacctccttgcgagattgcttcagcaaatgctgcaaaactgtggcggacagggtcccgcagagacggtcagcagcttagaagccgccaacaaacgcagtccctacgataattaatagaataaacaatacaacgattaaagcgaaagaactgatgccgccgtaaccgccgccgttagagtatcctgacataaggtttcacctccctatgaaggatactataagatatgctgaaccgatccatttggcagggataatagtggacaagagaaaaaatgaagaattcggctatatgaaggtgatataaaaaaatagcgggcgctgccgcccgctatttatgtacgattaagagatcagcacgcccgcgaaaaattcctggtataacgcttgaacggcttttctttcttcggcttcttttacgccaaacatcatgctcacttcagaagacccctgattgatcatttcgatattcacctgtgcctctgataatgctttggcggctcttgccgttgtaccgacattgtggcgcatcgcttcccctacaaccataatcagggcgagatgatgctcgacgatgacttcatcggcatgcaaatcctcttcgatccgtttgatgacgctgcgttcagtggcggcatccatttgcccctgccgtaaaatgattgtcatgtcatcgattcccgatggaacatgctcatacgtcaaaccatgctcctccaggatttgaagggctctgcggccaaaaccgatttctctgttcatgagatacttgctgatataaatgctgcaaaaaccggtgtcgctggcaatgccgacgacaggcccgtttgtgttatcccgcttgctgacgacgcgggtgccttcggctgaggggttgttcgtatttttgatctgaacaggaatccccgctctgaatgccggaatgagcgcttcatcatgaaacactgaaaagcccgcgtaggacagctcccgcatctctctatatgtcagctcgctgatttcctttggattctcaacgaaggacggattgacagaatacacagcgtctacgtctgtaaagttttcgtacaaatcggcttgtagtccgttggcaagaatcgaaccggtaatatcagaaccgctccgtgagaatgtgatcacatcgccatccttgctgaatccgaaaaaaccgggaaaaatgatgagtccgtcacgttcccgaagacgatagaggttttgataggattcaggaagaacttgcgcgttgccgggttcatttgtcacaaagaggccggcatccttcgggtttacatatttcgctttgacgcctttataacggaagtaagcggcgatcagtttggcattgttatcctctccgctggccttgactgcgtcaaggtattgttcgggattgcttttgtctccttctaaaagcgtaaacagatcatctctgattttttcgataatgctttgccccagctgaagctcattggcgatgagagcgtaccgttccacaacagcttccgccagttcaggtgcgctgcctgttgccaaatattgttctgcacatgcgattaagagatcagtcactttcgtatcctcggcatagcgttttcccggagctgaaacgactacagctttccgtgccggatctgaggtaacgatgtgaaacaccttgtcaagctgggcgcctgaagcaagtgagctgcctccgaatttaacgaccttcatgtttacatctcctaatgtttaaaattttcacacaaatttagtatttattatctctctttcagtactgtaaatcaaggggggatttctttctcaggagaacatttgtatttttcacgaggaataatgttaggtttgctgaccgtatgcctgcgttataaagataaatatggtaaacagcctaacgttttgggatggaaaatggttagaatgattagtaaaattgataaatgactaggttaatatttttaaagaatattgactaaccctataaaaatggtaatatgtaaatgataatgataatcaattactatatggccatattgttttgagtccttgcggagtaggagatacgttctttttgctgtaaggatgtaaggaggcagcatgaagctacgttacttatttattctacttatcatattagcagtcacatctgtatttatcggtgtagaagatctgtcgccgcttgatctcttcgatttaagcaaacaagaggcgtcaacgctgtttgcaagccgtttgccgcgattgatcagcattgtcattgcgggattaagcatgagcatctgcggtttgattatgcagcagatcagcagaaataaattcgtgtcaccgacgacggcgggcacgatggattgggcgaggctcggcattttaatttccttgctgctgtttacatccgccagtcctttaatcaaaatgctggtcgcgtttgtctttgcccttgcaggaaattttctgtttatgaaaatccttgaaagaatcaagtttaacgacaccatctttattccgcttgtcggtttaatgctcgggaatatcgtcagttcaatcgcgacatttatcgcatataaatatgacttgatccagaatgtgtcatcatggctgcagggagacttctctttagtcgtgaaaggaagatacgagcttctttatctgagtattccgctcgtcatcattgcctatgtgtatgcggataaattcacattggccggtatgggtgaaagcttttctgtcaacctcggcctcaagtataaacgggttgtgaacatcgggctcattatcgtgtccctgatcacgtctcttgtcattttgactgtcggtatgctgccgtttctcggtttaatcatcccgaatattgtatcgatttacagaggagacaatctgaagagcagcctgccgcatactgcgctgttgggagcagtttttgtgctgttttgcgatatactgggcagaatcattatcttcccttatgaaatctcgattggcctgatggtcggaatcatcggcagcggcattttcctgtttatgctgttaaggagaaaagcctatgcgtaaccagatgaaaatagctttgctcgttggtttagccattgtatgtattggcttgtttttgttttatgacttaggcaattgggattacaccctgccgagacgaatcaaaaaagtcgctgccattgtgctgactgggggagcgattgcgttttcgaccatgatctttcaaacgattacgaacaaccgcatcctgacgccgagcattttgggccttgattctctctacatgctgattcagactggcattatctttttgttcggttctgcgaatatggtcatcatgaataaaaacatcaactttatcatctctgttctgctgatgatactgttttctcttgttttgtatcagatcatgttcaagggtgaggggagaaatatctttttccttctgcttatcggaatcgtgtttggcacgctgttcagcagcctgtcttcttttatgcagatgctgattgatccgaacgagttccaagttgtgcaggacaagatgtttgccagctttaacaatatcaatacggatttgttatggctcgcgttcatcatcttcctgctgacaggcgtttatgtctggcgttttacaaaatttttcgatgtgctgtcgctcggacgcgagcacgccgtgaatttgggcattgactacgacaaagtggtgaagcagatgctgatcgtggttgcgattttggtttctgtttcaacagcgctagtcgggccgattatgtttttaggccttctggtcgtcaacctggcgagagaattcctgaaaacatataagcattcatacttaatcgcaggctccgttttcatcagcatcattgcgctggtcggagggcagtttgtggttgagaaagtgtttaccttctcaacgacgctgagcgtcattattaattttgccggcgggatttattttatctacttgctgttaaaggagaataaatcatggtagaggtcagaaatgtaagcaaacaatatggcgggaaagttgttcttgaagagacgtcagtcacgattcaaaagggcaaaatcacctcgtttatcggtcctaacggcgccggcaaaagtacgctgctgtctatcatgagccgcctgatcaaaaaggattccggcgagatttacatagacggacaagagattggagcatgtgacagcaaagagcttgccaagaaaatgagcattttgaagcaggcgaaccaaatcaatatcaggctcacgatcaaagacctcgtcagttttggcaggtttccgtactcacagggccggctgacagaggaagactgggttcatatcaaccaggcgcttagctatatgaagctggaagacattcaagacaaatacttggatcagctgagcggcggacagtgccaaagggcatttatcgccatggtcattgcccaggacacagattatatctttctggatgaaccgctgaacaatctggatatgaaacactcagttgaaattatgaaactgctgaaacggctggtagaggagcttggaaaaacgatcgtgatcgtcattcacgatatcaattttgcttcagtctattctgactatatcgtcgctttgaaaaacggccgaatcgttaaagaaggaccgcctgaagaaatgatagaaacatcagtgcttgaggaaatctacgatatgaccatcccgattcagacgattgataatcaaagaataggtgtttatttttcttaatatatagaagaggtgaggagcatgaaaaagttcgcgttactattcatcgctttggtcactgccgttgtcatttctgcatgcggaaaccaaagcacaagcagcaaaggttctgatacaaagaaagaacaaatcacagtgaaacaccagctcgacaaaaacggcacaaaagtaccgaagaaccctaaaaaagttgtcgtatttgactttggaagcttagatacattagataaactaggacttgatgatatagtagcgggcctgccgaaacaagtccttcctaaatatctgtccaaattcaaggatgacaaatacgctgatgtcggcagcttaaaagagccagacttcgacaaagtggcagaattagatcctgatctgatcattatttcagcaagacaatctgagtcttacaaagaattctctaaaattgcgccgacgatttaccttggtgtagatacagcgaagtacatggaatcatttaaatcagacgctgaaacaatcggtaaaatctttgataaagaagacaaagtgaaagatgagctcgcaaacattgatcactcaatcgcagatgtaaagaaaaccgctgaaaagcttaacaaaaacggtctcgtcatcatggcgaacgatggaaaaatcagcgcgttcggccctaaatcaagatacggcctgatccatgacgtgttcggcgtgacaccggctgataaaaacatcaaagcgtctactcacggacaaagcgtttcttacgagtacatttcaaaaacaaacccggattacctgtttgtcattgaccgcggtacagcgatcggtgaaacatcatctactaaacaagtcgttgaaaatgattatgtgaagaatgtaaacgcagtgaaaaatgatcatgtcgtctaccttgattctgctacttggtacttatcaggaggcggtcttgagtctatggcacaaatgatcaaagaagtgaaagacggtttagaaaagtaaaaccaaaaagagcctccgctaaatagcggggctctttttttgttaatcagcgtgccggctgctgttcggcagggcgctgaggtttctttaatgtgaatgagagaaggaagccgacaagtgcaatgacggcagccactataaaagcggcgttcatgccgtgcagggcggcgtgcttcacatttgtcgtgcctgcatgtgccgcctggttgctcatcacggaaaccaatagtgcggttccgatcgagccgccgacttggcgaatcgtgttgttcatcgcagttccgtgcggaatcaagtggcgcggcagcgcattgattccggctgttgtcaccggcatcatgatcatggcggtgcctaagagacgaacggtgtataaaacgacaatccaagcgagtgacgtatggtcagtcagctgcataaacggcagagatgtcaggaagatgatgcagaaaccggcaatcgccagccctcttccgccgacacggtcaaaaattctgccgataatcggcgacataaagcccatcacaacggctcccggaaggagcataagccctgtatcaaaagctgtgacgtctctgacattttgtgtataaagcggcaggatggtttccgtaccgatcaataatgcaaagacgagggttcccagcagtgttgttaaactgaaaatgccaaacgtgaagacgcggaattccagcatcggtttttcaagcttcatttgtcttgtgataaacaagagcagcgcgatgacacccaccagcagtgaaatcaagacggttgaactggaccagccgtaagagccgacgcttgagaagccgtacagaaggccgccgaacccaaatgttgaaaggatgactgataaaatatcaatctgtgtttttcttaaagtcgtcacgtttttcatcaggatgctggcaagaatcaaatcaatcacagcaaacggaagaataatataaaacaatgatctccaagagaaagcttcgacagcccatccggaaagagtcggtccgatcgcaggcgcgaatgagatgaccaatccgaccatacccatagcctggccgcgtttttcaatcggaaagattgtcaggaatacagtctgcatgagcggcatcataatgccggctccggccgcttgaatgatacgcgctgtcagcagaaccgggaagttcggcgcgaacgctccgacgactgttccggcagtgaaaatgctcattgctgtgatgagcagcgcccggcttgtgaatttctcaattaaaaacgcggtaatcggaattaaaatcccgttggttaacataaatgatgtggtcagccattgtgcttggttggcatcgacattgaaatccctcatgatatggggaagtgcggtaatcaacaatgtctggttcaaaatcgccacaaacgctccggctaacaaaatgccgacaatgacagaacggttaaaaggtttttgttcaatacttgtgttcaatacatatcccttcttttctctaagtaattaacagtgtttttaacatggaaacgggctgtgttaaaacactggtttgttccagatagccaatcagtgatttgagtaaaaaagcgcggggttcttccttcttcgcttcttcctccagcatggcggctgcggatgtcagttcatctacgtcatagtccgcggcggacagggaagagatgcctttatgtaattccttcaggctttccgataataggactgatttatcctttggcttgtaggaggatgctgaatgaatataaagctcgatggcttcgggcggaagaagagactggcgggtttccctgtttttgataatctgattgagggtgctgatgataaactctgcgatcgggtcaagctcaagcggtttttcctcgattttgatcagcattaaaaactcacgcatcatgccgtgaagaatgataaccaaatcccacacaaacgggagaatggtttctccatacgcctggatcagcgaatcgcggtgccagcagataatcgtcgatctggtctgatggatatgctgtttgacccggtcattatgcagcttggggtttccgtaggtcagcatattgaaaaactgctgattccgcctgaagccctccagttccattttgaccttttgcgtcaaacgctcctccggtgtaagtgcggtattttcctgaagtcttgaggctgcggccaccatttgcttctggttaaatgacagcagctccaaaagcagatcttctttagattggaacagcttatatatcgaagcttttgacatcttacattcttctgcgatcgcctgcatggaaaccgacgtaaaatccttttccgaaaaaagctttcgcgcggctaacaagatatctgtttttttatcaagcatctcatggcttccttctttcttgaacattagaaaacccattggttcacagaaaaccaatgagtaactatgaaaaaattttaccaaataaacaaaatagaagtcaatggattttaaccgggtaaatgaaaggcctgccggaaaatccgacaggccgaataagagcttatttttcaactttaaatccttgtttttcaagcatttcacggatgtgcggatagtacaggcgctcatagtaggaagcgatgctctgtgaccaatttcttgtttcttttccgtttgtccgtttattcatgtattcagacatctgttcgtcgtatgcctgaatgtgagacgtcagctcatcctgattcaaataagtttcctgatgattgacagcttcctgcggcaagcgcggttttttcgctgaacggtcggcaggatgcccaatgacaaggccggataaagggaacacgtattttggaagctcaagcagttcgatcagctcttgagggtttccgcgaaccgcaccgatcggaactgtgccaagtccgagtgactcagccgctgctgttgctgtgccgagggcaataccagcgtctactgcgccgacaagaacagattccaatccatttgtgatttccattttgaaatcatgcagatcttcaagcgcaattttggcccgattgaaatctgcgcagaacagcaggaaaacaggagcttgatcgatccatggctggccgcctgccagctcggagattttctttttgcgctctttatcctggactgtgatcacagtcacctgctgtccgttgatagaagaaggggctgattgcaccgcttcaatgatttggtccaattgctcctgagctacaggctcatctgtgtagctgcgaatcgagcggtggtcttttaaagatttaatcacttcattcatatgggacaccctttctttactcgctaagctctgtgcggacaacatcaagaggggcgctcagcagttcttttccttttgcgacaaacccttggaaatgcgcagtttcgttatggaatttcattgccgcttcatctttccatttttcaagcatgacaaatgtattttcttcgcctactttttcgaataggtcgtattgcgcgttgccttcctcagctcttgaatgctgaacaagtgattgagcctcgctcaaaaattcctcgcgtttttctggttttactttgatgtaagcttgtaatacgatcatttaaatctcctccgttgttatgcgaatttattgttcgaatttcatcgaactaaatgtaacatgtattctaaatgaggtaaaggaaaaacccttatatagtaaaattgtcattctaattgttgtgtgatacatttgtgtcatgaacattccaaaccatccagaaacagaaacattgcagctgacaaaggttcttcatgcacttagtgatccgcttcgtttagagctcgtcaagcaattagctgaagcaaaagaaaaaacgtgcagcacctgtgcagatgtgcaggttgccaaatcgactttgtcgcatcattttaaagttttgagagaatcgggcatcgctcaagttcggatagaaggaaagcgccggtattattcgcttcgcgctgaagaccttgaaaaggcatttccgggcctgcttgaagccgtgctgaatgtagaccaggaccgctggtgaatcaatcccctgtaacggggatttttttatgtccgtaaaccgctttgaaaagccgctgcacacccgcctgaatatcttcttccttcagccgtgcaaagccgataatgagagcaggcctgcccgtttgccgcttgttttccttcaagttaaatcggctcattccgaatatttcaagctgcagcccggcagcatgtgacaggatgtcttgttcggtgcgcctggtatcaaattcggtaacaaaatgcagccccgcatttgccccttttacggtaacctctccgctgaactctgcttctaaagcggtgatcaggcgttctctcttttctttataatgctgcttcattttttttatatgcttctgatattcaccagactcgataaattcctgcagggtgagctgtgtgagtgatgagcaagtctgcagatcatagccccgctgtttgtatgccctcaacagctcaggcggcaacaccatatagctgatccgcaagccggggagaagggactttgaaaaggttcccatatagatgacattttgaaaacggtcgaggctttgcagcgccggaatactgtctacatcatatgtgaattcactatcataatcgtcctcaatgatatatcggcgcggctcctcggctgcccagttcagcagctgaattcttctggatacaggcataatcgttccggacggaaactgatgcgacggggtggtcaccagcacatctggctgctgtctggtgatttcagcaatcgacatgcctttttcatccagcatgatcgtctttacttgttttccggcattcttcaaaagctgatacatgcgcctgtagccaggctcctccatcgcatacacggcttccttgggtaaaagctcagtcaacagctgcatgagcacctgtgtgcctgcccctatgatcatttgttccggcctgcattttacacccctcgtcagggaaatgagcctcgtaatggccgctctcacttcatatatcccttgcggatgtgacatatcgccgagcgtgcggtatgagcgggaggccgctttttgctcgcagcggaaccagcttttgatcggaaaatggtctgtatcggaactcatgtgtgaaaacgatatccaatcgctctggtcgatgtgaatctcttttaggtcatccggcagtgcaaatggagggtgctcctcggcggaaaacatgtctagttcctccacgaagaaaccctttcgttcaatggcgtacaaatacccctcagccagcagctgctgataggctgaattcactgaatttacgctgaccttgagattttcagccagctcccgcttggagggaaccttcgagtgcggcagcagattgcggctgaggatttcttttttcagcttttgataaatttgctgatagatataatcggcttgttctgaacgatcgagtgtaatcgtgatatccatttgtattttctccttctgataccatcaaaaagttataattggtacttttcatcataccaaagagaagtcagaatgataagaaaataccgacagggggatattcacatgagtcaaacaacagcaagcatcacaactgcacaatggcagcaaaaacgggatcaatttgtgtcaaaaggtgtgagcaacggcaaccgcagtctggcggtcaaaggagaaggggccgagctgtacgatctggacggccggagatttattgattttgcaggcgccatcggcacgttaaatgtcggacactcgcatccgaaggtggttgaggctgtgaagcggcagacagaggagctgattcatcctggctttaatgtcatgatgtacccgacttatatcgagttagccgaaaaactgtgtggcattgcaccgggcagccatgagaaaaaagcgatttttcttaactcaggggcagaagcggtcgaaaacgctgtgaaaatcgccagaaagtatacaaagcgccaaggcgttgtctcgtttacacgcgggtttcacgggcgcacgaatatgacgatgagcatgacaagcaaggtaaaaccttataaattcggtttcgggccttttgcgccagaggtttatcaagcgccgttcccttattattatcagaagccggccggcatgagtgatgaaagctatgacgatatggtcattcaagcattcaatgatttctttatcgcttcagtggcgcctgaaacggtggcgtgtgtcgtgatggagccagtgcagggagaaggcgggtttattattccttcgaaacggttcgtacagcacgtcgcttcattctgcaaagaacacggcattgtttttgttgctgatgaaatccaaaccggctttgccagaactggcacttatttcgcaattgagcactttgatgtagtgcccgatctgatcacggtttctaaatcgcttgcggcaggcctgccattaagcggcgtgatcgggcgttcggaaatgcttgatgcggcagcgccaggggagctgggcggcacgtatgccggcagcccgctcggctgcgcggcggctttggcagtcttggatattatcgaagaagaaggactgaatgagcgatctgaagaaattggcaaaatcattgaagatagggcgtatgagtggaaaaaagaattcccgttcatcggtgacatccgcagactcggggcgatggccgcaatcgaaatcgtcaaggatccagacacgcgtgagcctgataaagcaaaagcagcagcgatcgcggcctatgcgaatcaaaacggattacttttgctgacagcgggaattaacggtaatatcatccgctttttgacaccgctcgtcatctcagacagccttttaaatgaagggctcagcatcttggaggcgggcctgcgagcttaatcattggaaagaaaacggctgggtctgctatcattttaagtaatcatgaaaagaaaggaatgttcaatatgccagatcaattaacggtctacaacccggctacgggcgaggagatcaaaacgattcctcagcaatcagccacagaggtagaagaagccattgaacgttcacatcaagcgtttaaaacgtggtctaaaacatcagcgaacgaaagagcgtctcttttgaaaaaatggtatgagctgattgttgaacataaagaagagcttgcagatttaattacaaaggaaaacggaaaaccataccaggaagcagtcggcgaggtactttacggcgcaggctatatcgaatggttcgcagaggaagcgaagcgtgtgtacggaagaacggtcccggccccgacaacgggtaaacgaattgttgtcacacgccagccggtcggccccgttgctgctatcacgccctggaatttcccgaatgcgatgattacacgcaaagcggcgcctgctcttgccgctggctgtacatttatcatcaagccggcgccggacacaccgctgtctgcttatgaactagcgcgcctcgcatatgaagcgggcattccgaaggatgttcttcaggttgtaatcggcgatggagaagaaatcggaaatgtgttcacaagcagtccgaaaatccgcaaaatcacgttcacaggctcaacacctgtagggaaaatccttatgaaaaacagcgcggacaccgtgaagcacgtctcaatggaactcggcggacacgccccgctgatcgtagatgaagatgcagacattgaccttgccgttgaacaggcgatggcgtccaaataccgaaacgccggccaaacctgcgtatgtgccaaccgcctgatcgttcatgaatccattaaagatgaatttgctgcgaaactgagcgagcaagtgtctaagctgaaagtcggaaatggacttgaggaaggcatcaatgtcggcccgatcatcaacaaacgaggcttcgaaaaaatcgtcagccaaatagatgatgcggttgaaaaaggcgcgaaggttattgctgggggcacatatgaccgaaacgatgacaaagggtgctactttgtgaatccgacagtgctcaccgatgtcgatacgtccatgaacatcatgcatgaggaaacattcggcccggtcgccccgatcgtcacgttttctgatattgatgaagcgattcagcttgccaacgatacaccgtatggcttggctgcttacttcttcacagaaaactaccgccgcggcatctatatttccgagaatttagagtatggcattatcggctggaatgacggcggaccgtcagcggttcaagcgccattcggcggaatgaaagaaagcggcatcggccgtgaaggcggttcggaaggtatcgagccgtaccttgaaacaaaatatttgtctatcggtttataaaagaatgcacgctcctgagagctgccggattttccggcagctctttttgtgttccggcgaataatcacaacaattccagccaaaataacagcaaatacattttgaaagaaggttccccaacaatggatttattattggctcttctcccggctttgttttgggggagcattgttctcttcaatgtgaaattaggcggcgggccgtacagccagacactgggaacgacgatcggggcactcattgtttctatcgttatttacttttttgttcagcccgttctgtcccttcgcatttttattgttggaatcgtatccggcttattttggtcacttggacaggccaaccagctgaaaagcattcaattgatgggcgtgtcgaaaacaatgccgatttccacaggaatgcagctcgtttccacctcgctgttcggtgtgatcgtgttccgcgaatggtcaacaccgattgcgattacgcttggcgttctcgctttgatctttatcattgtgggaatcattctcacgtccttggaagataagaatgataaaaaagagggcgagccaagcaatttgaaaaagggcattttgattctccttgtttcgactcttggttatttggtttatgtagtcgtggctagattattcaatgtgtccggctggtccgcgctgctgccacaggcaattggcatggtggtcggggggttagttttaacctatagacacaaaccctttaacaagtatgcgatcagaaatattctcccagggttaatctgggcaggcggaaatatgtttttgtttatttctcagccgcgagtcggcgttgcaacgagcttttccctttcacaaatgggaattgtcatttctacgctcggcggtattttcatcctgcgtgaaaagaaaacgaaacgccagctaatagcaattgcgatcgggattatcctgataattgccgccgccgtattcttaggaatcgccaaaacaaattcataacaaatggaggaggatgtatatgtatccggatttaaaaggaaaagtcgtcgctattacaggagctgcttcagggctcggaaaggcaatggccattcgcttcggcaaggagcaggcaaaagtggttatcaactattatagtaataaacaagatccaaacgaggtaaaagaagaggtcatcaaggcgggcggtgaagctgttgtcgtccaaggagatgtcacgaaagaggaagatgtaaaaaatatcgtgcaaacggcaatcaaggagttcggcacactcgatattatgattaataatgccggtcttgaaaatcctgtaccatctcacgaaatgccgcttaaggattgggataaagtcatcggcacgaacttaacgggtgcctttttaggaagccgtgaagcgattaaatatttcgtagaaaacgatatcaagggaaatgtcattaacatgtccagtgtgcacgaagtgattccttggccgttatttgtccactatgcggcaagtaaaggcgggataaagctgatgacagaaacattagcgttggaatacgcgccgaagggcattcgcgtcaataatattgggccaggtgcgatcaacacgccaatcaatgctgaaaaattcgctgaccctaaacagaaagctgatgtagaaagcatgattccaatgggctatatcggcgaaccggaggagatcgctgcagtagcagcctggcttgcttcgaaggaagccagctacgtcacaggcatcacgttatttgcggacggcggtatgacacaatatccttcattccaggcaggacgcggttaaacaaaaaaagcgacccagacatcacatctggatcgcttttttattacgcacgctttttcttaacaagtgctgctacagataaaataatggcagccgcagacagcacaatcgctgtaatgtctagagctgaagaacctgagttttcggaatcgtcttttgttttcgtggcgctgtgctcatctgtcacttgttttgcagacgtgatgtttgtaatggaatgaggtgtatcggcatcctcgtcacctgtccactcaacaatgctgccgtctttgtaatattggtatgcgtcccaagcagcttcctccgctttgtcagggtttttggcaacaaaggtaaactgctggaactgtccttcctgaatgcctccgtcagtcgcctcccatgtcacggacactgatttgtcatcatgtttttgagtggagaccttccagcccggaattggctcatattgctggaattcaacatccttcggcattttgaggactaccttcgttgtcggcagatttttctctgaaggaaccttcattgtatacgtttcccaagagcctgcagcagactcagccggttttacagaaacatgcgcgctggcaggggccgtaaagaataagagggagccgacaatagccggacatagtgtcaatgcgatttttttcaacaacgtaaacactccttaattggtctttgtaaacatgatattgatttcgttaaagtcgccggtcaggccgtggactttgatcttccagtttcctttttcattaatcgacaggttttgatcctggaagacgccttttgttttttcttttaatgtaaaagtgcttttgttttcgctgcctgacaggcctgttttataaacggttaacgtgatttgctggatgtttttcacgggatctccgttatggtcggtgacccgcagctcaaaaacattttttccgggctggtttgggctgatgctgagagaaacgctttgtccgttctcaatcgctttggtttggtagaacggttccggcgccggctcaggcgggcttggcaggcttgtaaacacggccgctgtgatcaatacagcgatgccgattgcccactccgctttcaacgttcggctgattcctgtgcggcgctgctttctggtaagcagaaaatgaatcgtgcctaagaccagcatgaaaacaaacagcccgcttttcactaaaagagcttgtccgtacgctgtatggaacagtgaatccattgaacgaatgatgaaaaatccattgagcaagcctgaaaacaaaatgacgccgactgcagtgagcgcccatggggagaaccgtctgaccgtctcccacgcgagcgttttgtcaggctgcctccattcttttgagagcagcaaaacgagtgccgctattccgccgacccagatggaagcggaagttaaatgaaggaaatccatcaaaatgccgaccgttttttcttcaacgacagcagcatgcccggtaaacgccttggcaagcaggagaccgaaaaagaaaatgagcggcgctgtccaatagccaaaggatgaaaagcggtttttccgtatcgcagggatgacagacagtgcgagcagcacgaacagcgcagcctgtatgatccaaatggagccgcctgctgtctcaaacagtgtttctctgatgtagcccgcctggaatgcgctgccccagccgccgcctgcgttcgcttttgtctgaatcggaagctgaagcaaaagcgccagacccagtgctgcgatcgagccggtcaggatacgtctcgtccgtttgacgagctgttctgatttccctttataccagaaaagatggaagaaaaccgttccgataaacagagataaggctgtatacagaatcgcgcgatctgctgctgttcccggattcagcgctgaatcggctgctttttggctgctgaatccgccatccgctttcccgatactgaacggaatgacgccggaaacaggatgtccatccgcggatacggcattccattccgctctgtacacatctttaggcagattcttcttcagcttcactgtcatgatgtgatgattatcttttttgatttcagtcttgtccgtatccacacggtcgccgtttgaattatagactttaatgtaatgaaacccttcttcaaccggttcattaaattcgatttccacctgcgcaggggcgctttttaattcgctgttttccccaggtgaagatttgacaatataggcgtgagcaaagcttgttttcggcaggaaaacaagaaaaagcagaaggatgatccaccatctgtttcgcttcatcactcagacaccaccttccgctgtatgtgttgtgttatttcttggtgcaggtgcagcgtttctttcggtcttgaagcatatcttccagcgcttggtcgaaagtgcggacggctccgccgaatcctttttgaaatcgttcggcatggtcaagtgtcgcaaacggaatggcctgcggctggcagcagtgcaggtttaattcagcatttacgacgaaataagccgaaccggcactgacggttgtctgtaacagaaaatctctgcaaatcaagtgtgaaacctcttccgttttatccgcgtaacgcaaaaacgcgcaatgtgcgcagcatagctgttcaatgtcttggtttaccgtaatcagctgaaccgaatgagcttgattgacgggcttcaagcaatagctgcacatatgatccgtttgaggtgttcgggcggggagcgtgatgccgccggccgttttaatgacctgatttgactgaaccagctgattgacatctctgtataccgtcatttccgaaacgccaaaccttgcgctgatgtcagaaattctgagcgcgccttcttctttcagccacttcagtatgtgttgctgtctattaatcggaagcattcatacaccctcttcattaagatctatttaagcgtagaggattttagagacagagacaagtaagctgatgataaaaaatgtgaaaatgtgttgaacaacaacaaaacgaaacagaagggactctggtataatagacatatggaatagaaagtgaggaataccctatgaaagaaacaccatgcccgaactgcggcaaacctttgacaggcgacatggtcagatcatcaaatgtgccttgtcaatttcgctgcggacactgccgggaacggctttatgaatataaagtatcagctccgattatgctggtatcattagcggccatcgtgctgctcatttatcttttgctgctcctccgcaatgcggcaggttcaatgctgccggctgtacagcacgtgccgatggctgtttttgcgcttgtgtgcgcctatcccgtttttattgtgagtgagcgaatgatcgcaaagtacgtgattcaaaatggcaacatcatttatagaggaaagagaaaaggctcctgatatcaggagcctttttatttttaaaaaattgtcacagtcatgtgccaaagtcctctttactttcaattgtatagggactgtaagcgttttaacatagagtcaaagggaagcatcattctctgaacatatttttttatcttacagcgacaaacaaaacagggagggtttatatatgcagcagcaagaacagcagcaaggcggcatgaaagtgaaagtgcaacgctttgggagttatttgagcggaatgatcatgccgaatatcggcgcgtttatcgcgtggggtatcattaccgcgctgtttattccggcaggatggtttccgaatgaacagctgaacacgctggtcagcccgatgattacgtatttattgccgcttttgatagcgtatacaggcggaaaaatgatctacgaccaccgcggcggagttgtcggagcgacagcggcaattggggtgattgtcggatcggatattccaatgtttttaggcgcaatgattatgggtccgcttggcggatacctcattaaacagactgataaattattcaaggataaagtcaaacaaggctttgaaatgctgatcaacaactttacggcagggattgtcggcgcggctttaacgattctcgcgttttacgccatcggcccggttgtcctgacgctaaataaattgctggcggctggtgtggaagtcattgtacacgctaatttactgccgatagccagtgtttttgtagaaccggcgaaagtgttgttcctcaacaacgccattaaccacggaatcttaagcccgatcggaatcgagcaagcatcccaaacaggaaaatcaattctgtttttagtagaagcaaaccctggaccggggctcggcattttgctggcgtacatgttctttggcaaaggatcttcaaaatcaacggctcccggtgcggcgatcatccatttcttcggagggattcacgagatttacttcccgtacattctgatgaaaccggccctgattctcgcagccattgccggcggagcaagcggactcttaacgtttacgatctttaatgccggacttgtcgcggcagcgtcaccgggaagcattatcgcattgatggcaatgacgccaagaggaggctatttcggggtattggcgggtgtattggtcgctgcagctgtatcgttcatcgtttcagcagtgatcctgaaatcctcaaaagctagtgaagaagacttggctgccgcaacagaaaaaatgcagtccatgaaggggaagaaaagccaagcagcagctgctttagaggcggaacaagccaaagcagaagaagcgtctgagctgtctcctgaaagcgtgaacaaaattatctttgcgtgtgatgcgggaatgggatcaagtgccatgggggcatccatcttaagaaacaaagtgaaaaaagcggagcttgacatcagtgtgaccaacacggccattaacaatctgccaagcgatgcggatattgtcatcacccacaaagatttaacagaccgcgcgaaagcaaagctgccgaacgcgacgcacatatcagtggataacttcttaaacagcccgaaatacgacgagctgattgaaaagctgaaaaagtaatcttatagaaagagagtgatactcatgcaagtactcgcaaaggaaaatattaaactcaatcaaacggtatcatcaaaagaagaggccatcaaattggcaggccagacgctgattgacaacggctacgtgacagaggattacattagcaaaatgtttgaacgtgaagaaacgtcttctacgtttatggggaatttcattgccattccacacggcacagaagaagcgaaaagcgaggtgcttcactctggaatttcaatcatacaaattccagagggcgttgagtacggagaaggaaacacggcaaaagtggtattcggcattgcgggtaaaaataatgagcatttagacattttgtctaatatcgccattatctgctcagaagaagaaaatattgaacgcctgatctccgctaaaagcgaagaagatttgatcgccattttcaacgaggtgaactgacatgatcgccttacatttcggtgcggggaatattgggagagggtttatcggcgcgctgcttcaccactccggctatgatgtggtgtttgcggatgtaaacgacacgatggtcagcctcctcaacgaaaaaaaagaatacacagtagaactggcagaagagggacattcatcagaggtcattggcccggtcagcgcgattaacagcggcagtcagcccgaagagctgtaccggctgatgaatgaggcggcgctcatcacaacagctgtcggcccgaatgtgctgaagctgattgctccatctatcgcagaaggtttaagacggagaaacactgcaaacacactgaatatcattgcctgcgaaaatatgattggcggcagcagcttcttaaagaaagagatatacagccatttaacggaagcagagcagaaatccgtcagtgaaacggtaggttttccgaattctgccgttgaccggatcgtcccgattcagcatcatgaagacccgctgaaagtatcggttgaaccatttttcgaatgggtcattgatgaatcaggctttaaagggaaaacaccagtcataaacggcgcactgtttgttgatgatttaacgccgtacatcgaacggaagctgtttacggtcaataccggacacgcggtcacagcgtatgtcggctatcagcgcggactcaaaacggtcaaagaagcaattgatcatccggaaatccgccgtgttgttcattcggcgctgcttgaaactggtgactatctcgtcaaatcgtatggctttaagcaaactgaacacgaacaatatatcaaaaaaatcatcggccgctttgaaaatcctttcatttcggacgatgtgacccgcgtagcgaggtcacctctcagaaaactgggagaaaatgataggcttgtaggcccggcaaagaaaataaaagagccgaatgcactggcggaaggaattgccgcagccctgcgcttcgatttcaccggtgaccctgaagcggttgaactgcaagcgctgattgaagaaaaaggatacagcggcgtacttcaagaggtgtgcggtattcagtcccatgaaccgttgcacgccatcattttaaagaaacttaatcaataaccgatcacccgtgacacaatgtcacgggctttttttactatctcgctatctagtataatagaaagcgcttacgaaaacagggggaggagaatgacgatgaaacaattcgagattgcggcaataccgggagacggagtaggaaaagaggttgtagcggctgctgagaaagtgcttcatacagcggctgaggtacacggaggtttgtcattctcattcacggcttttccatggagctgtgattattacttggagcacggcaaaatgatgcccgaagatggaatacatacgcttactcaatttgaagcggtttttttgggagccgtcggaaatccgaagctggttcccgatcatatatcgttatggggcctgctattgaaaatccggagggagcttgagctttccattaatatgagaccagccaaacaaatggcgggcattacgtcaccgcttctgcatccaaatgattttgacctcgtggtgattcgcgaaaacagtgaaggcgagtatagtgaagtcggcgggcgcattcacagaggcgatgatgaaatcgccatccagaatgccgtgtttacgagaaaagcgacagaacgtgtcatgcgctttgccttcgaattggcgaaaaaacggcgcagccatgtgacaagcgccacaaagtctaacggcatttatcacgcgatgccgttttgggatgaagtctttcagcagacagccgctgattatagcggaatcgaaacatcatctcagcatattgatgcgctggccgctttttttgtgacgcgtccggaaacgtttgatgtcattgtggcgagcaacttgttcggtgatattttaaccgacatcagctcaagcctgatgggaagcatcggcattgcgccttctgcgaacatcaatccatccggcaaatatccgtccatgtttgaaccggttcacggctcagctcctgacattgccggacagggccttgccaatccgatcggccagatttggacagcgaagctgatgctcgaccacttcggagaggaagaattgggggcgaaaattcttgatgtaatggagcaagtgactgccgacggcatcaaaacacgcgacattgggggacaaagcacaacggctgaggtcactgatgaaatctgttcgcgcttaagaaagctctgatgaatcaggccggtggcagatggctgccccggcctgtccatttccttacgaaaatttccacgaaagtctaaccaagcagatccaaatgctgtataataatttggaattcttaggaaagcatcgggtgaaggaagttgaatgcaaaaacaatcacgttaaagaaaaaaagaaaaatcaaaacgatcgttgtactcagtatcattatgatcgcagctctcatttttacgattagattggtgttttacaagccttttcttattgaaggatcatcaatggccccaacgcttaaagactcagaaagaattctggttgataaagcagtcaaatggactggcgggtttcacagaggagacatcatagtcattcatgacaaaaagagcggccgctcatttgtcaaacgtttaatcggtttgcctggtgacagcattaaaatgaaaaatgatcagctatacataaatgataaaaaggtggaagaaccatacttaaaggaatataaacaggaggtcaaagagtcgggtgtaaccttaacgggtgacttcgaagttgaggttccttccggtaaatattttgtgatgggagataaccgtctcaattcactggatagcagaaacggattgggcatgccttctgaagacgatattatcggtactgaatctctcgtcttttatccattcggtgagatgagacaggcaaaataaaatgcaatgcaaaaagaacatggaacatgacggcaccgataataaagcgccgtgcacgtttaaaaaaatgatgatgaaacggtgcggagccggctttccgccccgttttttatgatagaaagcgttttgaagaaaagggccctgttgaaataaacagaatcaggattggcgaagccgtgaagcgcatcgaattggtaaatctcaagatgggtatgctgtttttcccgcagttttttgataagaagcgctacgtcaaacgacggctcataattagggaaaaacaataggaccgggcaggctggcacgtgatgaagagagtcgcgtatccgggaaccgtaataacaaaccgatccgctcacctcaggcatactgctgcatttccatgcgatagtagcccccacgctgaatccaatcacaaagatgtgccgtccggcgttttgcctgatcacattctggatgatggtttctcccgttttcagccgttcgtgttttgtaaattgttcgtatgccgttttttcttcttgcagtgtgtagacttcattctcgccgagcaggttgggcgtcaacacatcatatccagccattttgatcagccggcccatctttttcatatggctgtttacaccgtatatttcgtgtacgagaatgacaagcggttttggggacataacggcctccttttgtgttttttccattatatcctatcgtttcactttaggctgagatataatggtcaaaaaaggagatataaaatgaactcattatctttgcctcaccgctatccatttttgtttattgatggcgtgacggatagcgagcccggcaaacatgcggcagcttataagctgattagtgagaacgactggtttatcactgatacgcaaacagaaatgccgttttcacttgtgattgaagcgcttgcgcaaaccgcggcttttacaggaattacagatgagaacagcttgggattattgtcttcggtgaagaaagcggaaaagctgggagaagctgtgcctggtgaccggcttgatcttacgtttgaagtcacgcgcaatcggcgcgggtttgtgttcggacatgccaaggcgtcagttggagagcagcctgttgctgaagctgaaatcggcatctatattgaaaaatgaaaaaaacccttcacaacattttgtgaggggttctattttgtgtcgtaatcccgttcgctttgagagttatctctttgctggcgtttgtgtttttcatcattcatattttccttcagctcttcattaggaatcggatcggttaagtcgttgtgctcggggttttcatttggtttgttttgctgttttttttctgtcatgtttgatcacctcaccgtttgttttcctcttatccgttctcctcaaacataggaaaccgcttttttgtcccgctgggtataatgtattagaatagagagaagcacaacaaaaagataaagagaggtacatatatgtctgttcaaagagaagatgtagatatcaagctgatcgcaattgatatggatggtacactgctgaacgacgagcagctgatctcggatgaaaaccgcaaagccattcgtgaagcggaggataaaggtgtgtatgtggtgatcagcacgggccggacgcttatgacgtgccgggaactggcggaatcgctaaagctgtcatcctttctaatcacggcaaacggcagtgaaatttgggattcgaattttaatttggtggaacggaagctgcttcatacggaccatattcaaatgatgtgggatttgcggaataagcacaacactaatttctgggcttctacggtgaataaagtatggagaggcgagtttccggaaaacattacggatcatgaatggctcaaattcggctttgacatcgaggatgacgatatccgaaacgaagtgcttgaggagctgagaaaaaacaaagagctcgaaatcacaaattcaagtccgacaaacattgaagtcaacgcgcttggcatcaacaaagctgcagcccttgccaaggttacggaaaaactcggctttacaatggagaatgtgatggcgatgggcgacagccttaatgacattgcgatgatcaaagaagcgggtcttggcgtcgcaatgggcaatgcgcaagacatcgtaaaagaaacggctgattatatcacggatacaaatattgaggatggtgtcgctaaagcgattcgccattgggtactataaaaaaagagagtcctaagatggactctcttttttagtttggcaggttttattctgggaccatggtaggttttctgacaaaagtatttcacaaactgatatgattcacttataatgaaataaagttcaaaaattcggaatagtcgttccgaatttcgggacaataaatgacataaagcatatcgtttgctttggcaggagggattctgtgtttcagattgatttaaactgtgatttaggagaaagcttcggagcctacaagataggccttgaccaagatattttagagtgtgtgacatcagcgaatatcgcatgcggatttcatgcaggagatcctagtgttatgcgaaaaaccgtcgcgcttgcagcagaaagaggcgtgaaaatgggtgcgcatccgggcttgccggatttactcggttttgggcgccgcaatatggcgatttctcctgaggaagcgtatgatcttgtcgtttatcaaattggcgcgctctctggctttctaaaagcagagggacttcacatgcagcacgtcaagccgcatggcgctttatacaatatggcggcagtcgatcaaaaactgtcggatgctatcgcgaaagctgtctataaggttgatcccggcctgattcttttcggtcttgctgagagcgagcttgtaaaagcgggagaacggatcggacttcagaccgcaaatgaagtgttcgccgacagaacataccaatcggacggcacgctgacaccgcgctcccagccggacgcactcattgaaagtgatgatgccgccgtcacccaggtcatcaaaatggtgaaagaaggggcggtcaaatctcagcaaggacatgatgtgtcattaaaagcagatacagtctgcattcatggagatggagcccatgcgctgacatttgcgcaaaaaatcagaaaacagctcaaagcggctggaattgaagtgacagctatttcagaacagaggtcaacataaaggaggaacaatagatggagcagcagaaaaagacagcaggaaaaaaagcgggcagctggtcattgctgatgggcgccgcctttttaatggcgacatcagcaatcggaccgggtttcctcacccaaaccgcaacattcacaaacacactcgcagcaagcttcggttttgtcatcttaatctctattattttagatattttcgcccaaaccaatgtgtggcgcatcatcgcagtttctggaaaacgaggtcaggaaattgcgaatatggtgcttcccggactgggatatttcatcgccattctcgtcgtgcttggcggactagcttttaatattgggaatatcggaggggccgggctgggacttcaggtgctgttcggcattacacctgaaacaggcgctttaatcagtgccgttatcgccattttgatttttgtcatcaaggaagcaggaaaagcgatggaccgttttacgcaaatcgcggggttcgtgatgattattttaacggtctacgttgcggcgacgacagctcctccagtcggacaggcagtcgcaaatacattcgtcccggaacacatcagcatatttgccattgtcaccctagtgggcggaaccgtcggcggttatatcacatttgccgggggacaccgtttgcttgatgccggaattaaagggaaggaatccattccgcaggtgacaaaaagctcggttgtcggcattttaattacatctgtcatgcgtatcgctctttttcttgcggttctaggcgttgtatcgaaaggcctgcacatcgatgaaagcaacccggcggcttctgtcttcaagctggctgctggaaatgtcggttataaaattttcggattgatcatgtggtctgcggcgattacgtctgttattggagcagcctatacatctgtttcatttttcaagaccttttctccaaaaattgaaaagaattcacgcggtattattatcggatttattgtggtttctacgttagcttttgtcacaatcggccagcctgcgaagatcctcgtccttgtcggttcactgaacggcttaattctgccgattgcgctcggaacgctgcttgttgccgcctacaagaaaaacattgtcggtgattataagcatccgctttggctgacaagcacaggcgcgcttgtagtgattgtaatggcagttatgggaatctacacgttaattacacaacttcctcaattgtggagctgatataagtggagcaattaaacaaaatggcgccaaaggatgtacgcgccctgatacgagaggggaaaataaacgggccgaccgcaggcatgtctggcggctacgcccaagcgaatcttgtggttttgaaaaaggaccttgcttttgattttctgctgttttgccagcgaaatcaaaagccctgccccgtgctggatgtgactgaagcaggttcgcctgtgccgtctctggctgcgccggatgctgatatcagaacggactttccgaaataccgtatttacaggcacggtatcctaacggaagaagtatctgatattacgccatactgggaggacgattttgtcggctttctgatcggatgcagtttctcctttgaacaggcactaatcaataatgggatagctgtccggcatattgatgaggggacaaacgtctcgatgtataaaacgaatatcgattgtgttccggcgggggcgtttcacggacagatggttgtcagcatgaggccggttcctgaacggctggctgtacgtgctgcacaagtgacctcgcgttttccggctgtgcacggagggccgatccatatcggcaatccgggagcaatcgggattcgcgatctcgggaaaccggatttcggagatgccgttcccattcgtgacggcgaggttcctgttttttgggcatgcggggtgaccccgcaagccgtggctatgaatgtaaagcctgaaatggtcatcacacatgcgccggggcatatgctcatcacagatattcgagacgagtcgcttgcggtgctgtagcctctcgtcatcctgatgaacgagaaataaaagaggtgagaaagatgactgtacgatatcaaatcgaacagctcggtgattctgcaatgatgatccgattcggagaagaaatcaatgaacaggtcaacggcattgtccatgccgcggccgcttatatagaagaacagccatttccgggattcattgaatgtatcccggcttttacaagtctaaccgtattttatgatatgtatgaagtgtacaagcatttgcctcaaggcataagctcaccttttgagagtgtcaagcgcgatgtcgaagagcggctggcagaaatagccgaagactatgaggtcaaccgccgtattgtagaaattcccgtttgctatggcggtgaattcggtccggatttagaagaggtggcgaagatcaatcaactgtcaccggaggaagtaatcgacattcatacaaacggtgaatatgtggtgtatatgcttggcttcgcgcccggttttccttttctaggcgggatgtcaaaacgcattgcagctccgagaaaatcatcgccaagaccgtcgattcccgcaggttcggtcggtattgcgggattgcagacaggcgtttatccgatttcaacgccgggcggctggcagctgatcggcaaaacgccgctggctcttttccggccgcaggaaaacccgccgacattgctgcgggcgggagatattgtgaaattcgttcgcatctcagaaaaagactatcacgcctataaggaggagtccaattgagcatgaaagtattaaagcccggactgctcacaacggttcaggatataggcagaacgggttaccaaaaatacggcgttctggccagcggcgctatggacacggtttcactgcgcattgccaatctgttgataggaaacggcgaaaatgaagcaggtctcgaaataacgatgatggggcccggtccgtcgtttcatttttcaaaacagacactgattgctgtgacaggggcggacttcacgctgcgtattaatgacgaggaagcgcctttatggaagcctgtgctcatcaaggaaaacagcacggtcagctttggcccctgcaaactcggcagccgtgcttatttggcggcagctggcggcattgaggtgcctgccgtcatggaaagtaaaagcacatacgtcagaggaagcattggcggacttcatggcagagcgcttcaaaaagaagatgaactgaacattggagagatgtcagctctttcgcaaaccatcctttcccgcttaagttcgcagcttggaaaacagggatttgcagcaccgaagtggtcagtcagccgcggcagatttctgccattgaagaagaatcccgtcattcgggtgctggaaggaaagcaatttgcctttttcacagaagaatcaaaaacgcgtttttatgaagaagcatttcgtgtcacgccgcagtccgaccgtatgggctacaggctcaaaggagaaccgctcgaactgaaggccccgcttgagatggtgtcggaagcggtttcattcggaacagttcaggtgccgcctgacggcaacccgattatcctgcttgcagaccggcagacgactggcggctatccgaggatcgcgcacatcatatccgctgatcttccgattgtttcccaaatcatgccgggcgagcacgttcagtttgagcctgtgtccctccaggaggcagaagcgcttgcggtagaacgggaacagcatataaaagaactgaaaacgagaatgaagatggaatggctgacatagcaaaggggatgaatgatgcagaataaaaataaaaccgtagtcaaatctatggcgctgcttaatttgtttttgcataaaccaagcctaaccttaagtgaactggtgtcgctgacgggaatgccgaagacctctgttcaccggatggtcagctccttggaggaaatggggttcctcagtagggatgcgtccggcgcttattcgctgggattggtgtttttggaattcggacagcttgtcgctgacaggctggatatcagaaaaatagcgaaaccggtgatggaagagctgtgccgggaagtggatgaggccgtgcagttgatcatgagggacggcaatgaagcgatatacgttgagaaaatagaagggacacagactgtgcggctgtatacggcgatcggcaggcgttcccccctatacgcgggagcgtgcgccagaagcattctgtcctttcttccccgtgaagaaatcgaagcatacatcaaacaaaccgagctcatttcgattggctccggaacgattaccgatcccgaaaaactgcttcaggagattgatgcctctgtgcaaaatggctatactgtcagctattcagagctcgaaaactatacggcggcgatcggcgccccgatctttaaccatgagcgccaggtggcagccggcattagcattgcaggctttgaagcgagatttacagaagacaggctgccctatttaacagaaaaggtgaaggacgccgctttacagatttcaagaaaaataggatatacataagtagccaatcttttctctgctgcgtacattaacgtatcgacgttcaagagtggaggaaagaacatggtgcttcgatatacagctctgggcgattccttgacgacagggagaggctccgggctgttttcacccggcttcgtccagcgttttggggacatgatggaagctgacttgaaaacaagaacggcaataaacatatttgccagatcaggcctgaatacagaagagattttgggactcctgtcatatccctatgtgcaaaaatgtattcgagatgctgatatgataacgatcacagggtgcggaaacgatctcatcgattcggtcttagcctaccaaacctctaaggatgaaacgattttcagccgtgtatccgcccattgccatgagaattttgaaaagatgattgccaaagtcgccgagattaaaggagaaaatccttccccgtacgccattcgtgtgttcaacttatacaatccgtttcccgaaattgatatcgccggcaaatggatcacttcgtttaattcacatttagaaacacttgcatcagcaccccatgtcaaaatcgcggatgcctatagcatcttcaaaggcaaagaacaggaatatctgtcctttgacggtgtccatccgaacagcaaaggctatcaagcgatggctgaagccgttcacaagctaggctataaagaattatcagtttcatagaaaacgcgcctcatgacaggcgcgttttttatgtgtgatcgaaatattaaaagaaacttaaaattctctgtcttctgttctacagacaaacaaagtgcgctagaataatggagggcgtaggcaaatatagccataacgttcaatatttcgtatataaggaaggatggtccttttgtttcggatttttaaaatgtcttttgcggttatcattattatactggcgcttattgcttttaactatacggaacacacctctgttatccaatcggtcatgctcgtctttcttggtgcggtcatgtttatgcaggggcttgaagaacgcaaaaaagaaaatgacggctcaggcgcttttaatatttataccgccgtttttgtatggtctgtctcccttatcggttttacacttcatattatataaatctattacacatcctgaaaatgctcgaccgtcgggaacggggtatagaaccgatgaagcaaggctttccactcttgatactctgaagaaccgcgaaagccttccgtatggtcctcaagtgtttcccactccacaagaagcagatatttatgcgtttcctccatgcattttgataacgagtgcgtgatatagcccttcatgccggaaataatcggcgccgcttgccggaatgcatcctcaaactcttgttcaaggccttctttaatgtgaagcattgctgcctccctgaccatgctatcccttctttctgtcttttcgaatagtctacagcaaacgataggagatttctgcaaaatcggtgaacttttccttcattttcaaaaaaatcttgcacgcaccaattcaattaagagaaaataacaagtggaaggcaggggaaagtcatgttaaaaaagtgtattctactagtatttctatgcgtcggattgattgggttaatcggatgctccaaaacagattcaccagaggatcgcatggaagcattcgtgaaacagtggaacgatcagcaattcgatgacatgtatcaaagcctgactaaagatgtcaaaaaagaaatctccaaaaaagatttcgtcaacaggtataaagccatctatgagcaggccggcgtaaaaaatttgaaagtcactgcgggagaagtagataaggacgatcaagacaacaagacaatgaaacatatcccgtataaagtcagcatgaacacaaatgccggcaaagtcagcttcaagaatactgctgtgctgaaattagaaaaaacagatgacgaggagtcatggaatatagattgggacccatcgtttattttcaagcagctggctgacgacaaaaccgtgcaaattatgagcattgaaccgaaacgaggccaaatttacgataaaaatggaaaaggtttagctgtcaatacagatgttccggaaattggaattgttcccggagagcttggcgataaaaaagagaaagttataaaagaactcgccaaaaaacttgatttgactgaagacgacatcaagaaaaagctggatcaaggctgggtaaaagacgattcgtttgtgccgctcaaaaaggtcaagcctgaccaggagaaattagtttctgaagcgacgtcattacaaggcgtaacaagaacgaatgtcagctcccgctactatccgtatggcgaaaagacagcccatttgacaggctatgtccgcgccattacagcggaagaactgaagaaaaagaaagaaggaacgtacagcgatacgtctaacatcggtatcgccggacttgaaaatgtgtatgaaggcaagctaagaggcacaactggctggaaaatctacgtgccgcaaaccggggaagtcatcgctgaaaagaaagcaaaggacggcgaggatcttcacctcacaattgatatcaaaacgcaaacgaagctgtatgatgaactgaaggatgacagcggggcggcagtcgcgctgcagccgaagacaggcgaaacactcgcccttgtcagcgcgccttcctacgatccaaacggatttattttcggctggagcgataaggaatggaaaaagctaaacaaagataaaaacaacccgttttcagcgaaattcaataagacatacgcgccaggttctaccattaaaccgattgcggctgctattggaatcaaaaacggcacccttaaagccgatgagaagaaaacaatcaaaggcaaggagtggcaaaaagattcgagctggggcggctattcagtgacacgtgtgtctgagagacttcaacaagtcgatttggaaaacgcccttattacgtcagacaatatttattttgcccagaatgcgcttgatatgggagcggacaccttcacaaaaggcttgaagacattcggtttttcagaggacgttccgtacgaattcccgatccagaaatcgtctattgcaaatgacaagcttgattcagacattttgcttgcggatacaggctacggacaagggcaaatgcaaatgtctccgcttcacttggcaactgcttacacgccatttgttgacaatggagaccttgtcaaaccgacgctgatcaaaaaagattcacaaacagctgatgtttggcacaagcaagtggtcacgaaggaaggagcggcagacattacaaaaggtctgaaaggcgttgtggaagatgagcgcggatcagcgtatcagcctgtcgtgaaaggaatcacagtggctggaaaaacaggaacagccgagctgaaaacatcaaaagatgataaagacggcacggaaaatggctggtttgtcggctacgattacaaaaacaaagacctgcttgtcgccatgatgatccaaaatgtgcaggaccgcggcggcagccactatgtcgttgagaaagcgaaaaagcaatttcaatcgaattaaaatgtctttttaaaaggagcgaaaggaaaaagaggatctgaggccgaatgaactagtaaggggcaaaacccggtttatacaaagaaaagagggattttgcatgcagcgtattcaattggcggaggatcttcaattttcaagagtcatacacgggctttggcggctgaatgaatggaactattcagatgctgaacttctaagcctcattgaatggtgtatcgatcacggcatcacgacctttgatcatgcggatatttatggaggctatacgtgcgaaaagctgtttggaaacgcccttgccctttcgcctggattaagagaaaacatagagttggtcacaaaatgcggtatcgttcttgaatcgcctgaacggcccgctcacagatcgcatcattataacacaagcaaatcgcatattttggcatccgttgagcaatcgcttatgaaccttaggacggattatatcgatatgcttttgattcacagaccggacccgctcatggatccggagggggtagcagaggcgtttcaggccttgaaatgctctggcaaggtcaggtactttggcgtttcaaattttaaagatcaccagtatcggatgctggaatcatatttgcctgagaagctcgtaaccaaccagattgagctttccgcatacgaattagaaaatatgctcgacggcactttgaacctgtgccaggaaaaacgtattccgccgatggcttggtcgcctctggcaggcggcaaagttttcactggtgacacggaaaaagaccggcgtgtccgcacggcgcttgaatccgttcaagcagagattggcgccgcttcattggacgaggtgatgtacgcatggctgtatacgcatccggccgacatcatgccgattgtcggaagcggaaagcgcgagcggatttccgccgcgataaatgcgttgtcatacaagcttgaccaggatcaatggttccgcatttttacagccgtacagggttacgatattccataaaaagcatcagcttaccagctgatgctttttcaatattgtcacaccgcatagtgccaaattaccatttataagtgattgattctttcttgaaagcgttttatattaaaaggaaacctctctatatcctctactgcatctccttgcgacttcatccgcacatcaagattgtctaggaggtcttttttatgtatatgactgccagagaacaaaagctgttaaagcacttattattacaaaacagatatataaccgtaactgagcttgctgagctgatgcaagtcagcacgagaaccattcacagggaactcaaatcaattaaaccgctgatggaaaccgttgggcttacgttagataaacagcccggtaaaggtttgaaagcagtgggaagtcccgaagataaacaaaagctgcttactgatttatcatatgaacagcatgaatacagcgccgacgaacggaaactgctcattctttgttcgttattagagtctcaggagcccgtcaaactgtacacgcttgctcatgatctccaggtgacgaatgccacggtcagctatgacttagatgagctcgagaagtggatttctcccttcggactgacactgatccgcaaaagaggttttggcatccagcttatagggccggagaatgcgaaacggaaaattgtcggcaacttgattgtgaaccgtctcgacatccaaatgtttttggaagcggttgaattaaacatcaaaggaaaaaccgattcttcagagaaaatgttcggggttgtcagcaaaggtgagctgttaaaaatggagcgcatcttatttcagctcaaagaaaaaatcgctttttcattgtccgacagctcctatatagcgctcgtcgtccatctgacgtatgctatcgaacgaattaagcttggggaaactatcaccatggagcaaaatgagcttgaggaactgaagaatgcgaaggaatacagctccgctcttgaaatcgcgggcgagcttgaacgtgccttcggcgtgacgattccagaggcggaggtcggctatattacaatccaccttcgaagcgccaatcgaaaatacaaaacagaatacaaagcgcaggaaattgagctggaaacagccctgcaaacaaagcggctcattgcttttatttcagacaaaatcagaatggatctgacgaaaaactactctttatatgaaggcttgattgcccatttggagccggccgtcagccgcataaaagaaaatattgagatatacaatccgatgaaggaacagatcaagcgcgattattttctgctttatatggcgatcgaagaaggtgtcgaaaagtattttccgggcatgtccttttctgatgatgaaatcgcttttatcgttcttcactttggctcggctcttgaaatcaaaaaagaagaagcaaaagtgaaagcgcttgtcgtctgctcaagcgggatcggctcctcgaaaatgcttgcctccagactgaaaaaagagctgccggaaattgaatcgtttgatatgtcatccctgatcgagctaaaggggaaggatgttcaagcctatgatatgattgtgtccactgtaccgattccttatgaaaacattgattacatcatggtcagcccgctattaaatgaggaagacgcaaaccaggtcaagcagtatatcaagcggaagattccccttattcttaacaaaaaaagaagcccgaaggaagaggcgcagcaagctgatgtacctgacatgctagaggcggcggaaagcataggccggtatatggaagttatccaagatgttctgcgccattttacgctagctcaactcaaaacaaacccggaccatagcatgcttctgctagagctttttcaacagctgaagaaggatggcctgatccgtgatccggaaaaagccgcggtttgcctggctgagcgggagaaacaagggggattgggaatccccggaacaaacatggcgctttatcatctcaaaaatgatgaaatcgtcctgccttttttcaaaatgtttgatctcagcacctcctatgaagtggatggcatggacggaaataccctcaggatgacacgcattctcgtcatgatggcgcctagctcattatctgctgaaggctcggagattttaagcgcgatcagctcggcaattatcgagagcagagaaagcatggcggggtttcaggaagaaggagaacaagaattgtatcagcggttaaaccgcatatttttcacatggatgaaagaaaaaaacatactgtaaacctgcatggcacacgtcaaaaatttggcgtgtgtttttctgtggatggggaacaaaataagaaaatgtgggactattttatcattcagtattggaataattccaaaatgaaatagttttacaagttatcttttttgggttaaaatgggtgaggcaaggaagaaaatctaacaaattattgaagattcaagagaatataggagatgacgatatggaaacattacagcatctgattctgcatgacatgccgaatagcgaagaaatagaggctgtaaaaagcggagaccatacactgacatataaaggttaccgtaaacggattaatcagctggcgaatgccatgcttcaaaaaggaattcaaaagggcgaccgtgttgcattgctttgcaaaaacggccatcccgcatcaactgttatgttcgccgcgcttgaaataggtgctgttgtcgtacctgtcagctggcagctgaaaccatatgaaatgacaggcattttaaaagcaagtgaaccgaaagcgatgttttacggagcggagtttaaagagatactggatgaagttctacctgaattgtcctcactgtgtgtaacaatggaaacaggaacagcttacgaaacatctgctgaatttgaagcgctgtttgcaggtcctgatcatttgccagagacggaaatggtttcacctgatgatacagcacttctgatgtttacatctggaacaacgggaaacccgaaaagatgcatgattacacatggcggcatatacagatacgttaaaaaatccaacagctcaatagcacgtatgaagggccttcgttttctcgcgtgccatccgatttatcatacgagtgcgctcatttgcatcatgcttggaacgtttgcagaaacaacctttgtgtttacaaaggatcaagatcctgttcacatgctgaaggtcattgaagaagagaaaattcagaccgtgatggctcttcctgtgttttacacgtatttgcttgaggcgtgggaaacgcaccaaactgacttatcttcacttgttattttaatgacaggcggaacaaaagtgccgagcagcctaatccgccgctatcttgatattggcattccgctcgcgcatggctatggaagcactgaggcttggggcatcagcacatggacgcctgatatgggaatggataaagcggcatctgcaggaaaacctgtggcaggtgttaaagtcaaagtggaagatcctctgaccggagaagaacttcctcaaggagaaatcggcgaaatcgttgttcatactccattcttatttaaaggctatgaagacaatcctgaagcaacagcgaaagtgctgcaaaatggatggtttagaaccggagattcaggatatgtagatgaagatggctttattttcatcacgggacgctacaaggatgtcattatttacggaggcgataacgtctatcctgatcaggttgaagaagttatccagcagatcccgggaatccttgaaacggctgtggtcggtattccagacccgctttacggtgaaaaaccgaaagcttttatcgtgaaaaatggcggccagcgcatcacagaagaggatgtcatcgcattttgtaaagaacgcctgtccgcttacaaaatacctgaagttgaatttgttaacgaactgccgaaaaacaaccttggcaaggtgaaaaaagacgtcctgcgcaatcaggctgtacattcataaaagaagaagcccgtccactttatgtggcgggcttctttgcacttgcacagacggaaagctcaggcttaatgttcttaaattgtatatcaatgtcttcgaagccggctgctttaaagtcagcaatcatctgtcttccaaatgatttggttttttcaggactggcatccgcttcccgcggctgcatcgtaatggctgctttgccgcctggctttaatgcccgataaatctgtttcatgccttttgtttggtcattccaaatggtgtagttgttaacggaaatcactttatcataaaacgaggcggggagaggaaatgtctcgatgcttccttgtatcaggcgtacgccctttggtttcactctgcgggcggccagcttcagcatggcctctgacacatcaatcccatgaagatgaacatccttctcgcgtttcagcatctgctgcatgcagtatcccgggccaaacccgacttctaaaatgctgtccccgcgcgtgatacccagctgattgattgtccactgattcagtgtttgattttcagcagccatgatgtacccggcaatcatgccgatgacgccctttggcctgctgaatcttctagaaagcatgttaatcattcagcaaccaaccccctttttgagttaatttcctcccagcgttccatgtgaaacatttttctgataaagcaatgcgaaggtgccaagccatgtttatccatagagtgtgtgaggtacacaacaaatagacatgaaaacaaaggaggagaatcatcatggcaaattatccaaaagaactgccggcacaaactcaaagtcgccagccgggaattgaaagcgaaatgaatccaagtccggtgtatgagtacgaggattataaaggagcagacaaattaaaaggaaaagtagctcttattacaggcggcgacagcgggatcggacgcgcggtttccgtcgcttacgcaaaggaaggcgcagacatcgccattgtgtataaggatgagcatgaagacgctgagaagacgaagaaacgtgttgaacaagaaggcgtaaaatgcctgctgattgctggtgacgtaggtgaagaggaattctgcaatgaagcggttgaaaaaacggtcaaggaactaggcggccttgacatccttgtcaacaatgcaggtgaacagcatccgaaggaaagcatcaaagatattacgagcgaacagcttcaccgcacattcaaaacaaatttttattctcaattttatttgactaaaaaagcaattgattacctgaaaccgggcagcgccatcatcaatacgacatccatcaacccgtacgtagggaacccgacactgattgattatacagcgacaaaaggggcgatcaacgcctttacaagaacaatggcgcaggcgcttgttaaagacggcatccgtgtaaatgcagtcgcgccgggtccaatctggacgccactaatcccagctacgttccctgaagaaacagttgctcaatttgggcaggatacgccgatgggccgtcctggacagcctgttgagcacgtcggctgttatgtgctcctggcatcagatgagtcctcttacatgacaggacagaccctgcatgtcaacggcggaaactttgtgacgacataagagggagtgagacatatgagcatcacgaaagaagaagtgaacagctactatcaaaaagcagggattgtattaacggacgaggaagtagaccaaatccagctgatggattacggcttaggaaaagaaagaaaagtcgggctccagctcttcgtctacgtcaatacagaccgttattgttcaaaggaattggtgctgtttccgggacagacttgcccggaacaccgccatccgccggtcgacggccaggaaggcaagcaggagaccttccgctgccgctacggaaaagtgtatctttacgtagaaggagaaaaaacgccgcttccaaaagttctccctcctcaggaagacagagaacactatacggtctggcacgaaattgagctagaaccgggcgggcaatacacgattccaccaaacacaaagcattggttccaggccggggaagaaggtgccgtcgtgacggaaatgtcatcgacgagtacggataaacatgatatctttaccgatccaagaatataaggatgggcttaacagcccatcctttttgtattgaaaaaaacagaatcatcgctataatggttaaaaaaggaaagagggcgaggcaatgttcacttgcaaggtaaatgagcacatcaccatccgattattggagccgaaggatgcggagcggctggccgaactcattatccaaaatcagcagcggcttggcaagtggctgttttttgcggaaaatccaagcagcgctgacacgtaccgagaaacaatcattccagattggcggcgccagtatgccgacctgaacggcattgaggcgggtctcctttatgacggcagcttatgcggcatgatcagcctgcataaccttgatcaagtgaatcgtaaggcggaaatcggatattggattgccaaagaatttgaagggaaaggcattattacagctgcctgccgaaaactcattacgtatgcttttgaagagcttgagctgaatcgtgtggcgatctgtgcggctgtcggaaacgaaaaaagcagagcggttccggagcggctcgggtttctagaggaaggcagggcacgggacggcttatacgtaaacggcatgcatcacgacctcgtctactacagtctgttaaagcgtgaatgggaaggcgaaaaataaagagcacactttcttgtttaaatcttccccggatgtggaaaagtaacagcggagacgttaaaaaggagtgattcgagatgaatcagcaagacattaaacaaaaagtgcttgatgttctagatcaccataaagtaggttcgctcgcaacagttcaaaagggcaaaccgcattcccgctacatgacttttttccatgacgggctgacgatttacacaccgacaagcaaggaaactcataaagcagaagaaattgagaacaaccccaatgtccacattttattaggctatgattgtgaaggttttggcgacgcatatgtcgaagttgccggaaaagccaaaatcaacaattcggcagaactcaaggacaaaatatggagttccaaattagagcgctggtttgacggcaaggatgatccgaatctggtgattcttgaaattgaaccggaggatatcagattaatgaatgccggagagaaaacaccggtctcactcgaactataaaaaatttgtgttttcaggggcgatatgttattatgaatagctagtaagaaaaataagcaaataaaaaagaaagtaaacttcttttttctgttttgagagagaagcttaccgcttcccaagcagcataaccagctgcccttattcttttccttcataacaaatcgcccctaacgatgagatggaaaaaagacttttttgttttacaattcacaccggcgcggcttcggagccgcagtgacgattgagaggtagggctttcgttgtcttgtgttcaagaaatttccatggtgtttactttccagaatgattcttcggaacaatgctttatgaatctaacccgcctgacttggcggatgatataatctttatttgcgtatagaaaagaataagacaaaccgcccggcgtacgccggacggtttttttattgcaaaaaacacatcgtactgaaacctccttgtcttctttccagtcttatctctaggatgaaattggaggaagaataacgtgcatgtcattacaacacaagtactttttattttttgttttttattgctgattcactcgatagaaaccttagcctatgctacaaggctttccggggcccgcgttggatttattgcgtccgcgctttctctgtttaatgtcatggtcatcgtatccagaatgtcgaacatggtgcagcagccctttactgggcatttaattgatgctgctggaaaaaacgcactggcgattgtaggggagcagttccgctttttaattttcggatcgacagtcggcaccattttgggcattatcctgctcccgtcttttgtcgctcttttttcacgggcgattattcacttggcgggcggcggcggctccgtttttcaagtattccgaaagggattctcgaaacaaggattcaaaaatgccctttcctatttgcgtctgccgtccatttcatatgtaaaaggatttcatatgcgcttgattccgaagcgtttgtttgtcatcaacatgctgatcacatcgatttatacgattggcgtgctttcggctttatacgcaggccttctggcgccggagcgcagcacgacagccgtcatggcttcgggtttgatcaacggaattgcgacgatgctgctggccatttttgttgatcctaaagtatccgttctagctgatgatgtggcaaaaggaaaacgaagctatctctatttaaaatggacctctatcacaatggtcacatcaagggtggcgggcacactcctcgcccagctcatatttattccgggggcctactatatcgcgtggctgacaaagtggttttaataagaaaggctggatcataaagatccagccttttttgcattcccttatttatatttccttaatccgcggtcgtacaaaaaatttccgaatgggacgaaagcagcgacgaagccggcagctgaccatttcagcggccatttgacagagaaggttgcataagccaagacaagcaaatacaaaatgaacaacccgccgtgaaccgaaccgacaattgtcaccgcaagcggaaggcctgcccaatatttaagcggcatagcgatgaacaacaggattaagagtgacattccttcaataaaacccatcgtgcgaagtcttccgatcggcgtgtgcagcataaatcgccctccttgtggacacgttttcattttatactataaacaatccggaggggcatatgacagctttcaaaaaatgttcggaaaacattcatttttacatgccttttctagggaactgtacttgtcatttacaaaaatacccgagataatgtgtacaaaatcaaaaaagaaggatgttgaaatgaaacttgaccagattgatctgaatatcattgaggagctgaagaaggacagccgtttgtcgatgagggaattaggcagaaaaattaagctgtcgcctccatctgtgacagaacgggtaaggcagcttgaatcgtttggcatcatcaagcaatacacgctggaggtcgaccagaaaaaacttgggcttcccgtttcctgtattgtggaagcaaccgttaaaaacgcggattacgagcggttcaaaagctatattcaaacattgccgaatattgaattttgctaccggattgcaggtgcagcctgctatatgctgaaaatcaatgccgaaagcctcgaagcggtagaagatttcattaacaaaacatcgccctacgcgcaaaccgtcactcacgttattttctcagaaattgacacgaaaaacgggcgcggttagagagtgccgcgtgaagtctgttataataacaggatgagcgcgaaagaaagagaagtgatcaagcatgtcaaaaacagttgtattagctgaaaaaccttcagtcggccgggatttagcccgggtgctgaagtgccataaaaaaggaaacggttatctcgaaggcgatcaatatattgtgacctgggctttaggccatttggtgacgcttgctgatccggaaggctacggaaaagaatttcaatcatggcgcctagaggatctgccgattattccagaacccttgaagcttgtggtgataaaaaaaaccggaaagcagttcaatgcagtcaaatcccagcttacccgtaaagacgtcaatcagattgtcatcgcgactgacgcaggccgggaaggtgagcttgttgcgcgctggatcattgagaaagcgaatgtccgaaaaccaatcaagcggctgtggatttcatctgtgacggataaagcgatcaaggaaggttttcaaaagctgcgcagcggcaaagaatatgaaaacctgtaccattctgccgtcgccagagcggaagcggattggcttgtggggatcaacgccacccgtgcacttaccacaaaattcaatgcccagctctcatgcgggcgtgtgcagactccgacgcttgccatgattgcaaagcgcgaggcagacattcaggcgtttacgcccgttccgtattacggcatccgtgctgcagtcgacggcatgacgctgacgtggcaggataagaaatcaaagcagacgagaacgttcaatcaagatgtaacaagccgtttgctaaaaaatctccaaggaaagcaagcggtcgtagctgagctgaaaaaaacagcgaaaaaaagctttgcgcctgcgctttatgatttaacggagctgcagcgtgacgcccacaagcgcttcggtttttctgctaaagaaacgctttctgtactgcagaagctatatgagcagcataagctcgtcacatatccgcggacggactctagatttttatccagtgacatcgtcccgacgttaaaagaccgtctggaaggcatggaagtaaaaccgtatgcccaatatgtcagccaaattaaaaaacgcggcattaaatctcataaaggatatgtcaatgacgcgaaggtgtcagaccaccacgcgattatcccgaccgaagagccgctcgttctcagcagtctgagtgataaagaacgaaagctgtatgacctgattgcgaaacgtttcctggctgtattaatgcctgcattcgaatatgaggaaacaaaggtcatcgcagaaatcggcggagaaacctttacggcgaaaggcaaaaccgtgcagtcgcaagggtggaaagccgtttatgatatggcggatgaggatgatgagcaggaggatgacagagatcagacacttcctgcgcttcaaaaaggcgacacacttgccgtccgcacgttaacggaaacaagcggccaaacgaagccgcctgcccgctttaatgaaggaaccttgctgtcagcgatggaaaacccaagcgcgtttatgcagggagaagaaaaaggcctcgtcaaaacgcttggagaaacaggcggcctcggcacggtggcaacgcgtgccgacattattgaaaaactgttcaacagctttttaatcgagaaaaaaaaccaagatatttttatcacttctaaaggaaaacagctcctgcagcttgttccggaggatctgaaatcaccggccttaacagcagaatgggagcaaaagctgtctgcgatcgcggccggcaaattgaaatcggctgtttttattaaagatatgaaggcttacgctcaccaaacggtaaaagaaatcaaaaacagcagccaaaccttccgacatgacaacattacgggaacggcatgtccggaatgcggcaaaatgatgctgaaagtaaacggcaaacgcgggacgatgctcgtgtgccaagatcgtgaatgcggaagcagaaaaacgattgcccgaaaaacaaacgcacgctgcccgaactgccataaaagaatggagcttcgcggccaaggcgagggccaaacctttgcgtgtgtgtgcggtcaccgtgaaaagctctctgtatttgaaaaacgaaaaaacaaagacaaagcgcgtgctaccaaacgggacgtatcctcttatatgaaaaaacaaaataaagatgagccgattaacaacgcgctggcagaacagctgaaaaaactcggtttggataaataataaaaaaacctgtgcctatcgcacaggttttttattggacttaggtcctgttttcttaatgttcaaaaaggggaaaaaaagctagcaatctgcatttttttcttttatagtaaatgtactttgtaacatggcagtcatattttcgtctataactatttgtgagcgtctgatttgcttcaggcgacaaagggggatttgcctgtgaggcatgtactaattgctgtcatcttattcttcttatctatcggactttccgcagggtgtgctgaagctggaaacaagacccaaaatcagtcggcgacagaagtgaatgccagcccgctccagccggcggaatatttcatctatcacaatttaatgaatgacaaagggctgatcaaaaccgatttttcagaccagccttcttacttgtcggaatctctcggactgtggatggagtttctgctcagcaaaaatgacgcaccacatttccaggatcaatatcagcatctgactgattcatttctgatgagcaatcacttggtgacgtggaagattcaaaatggccaagcgagcgggacgaatgcgctgatagatgatatgagaattatgctgtctcttgaccaagccgccgcaaaatggggccgcagcgactacgcgcaaacggctagggatatcggcacgtctttgaagacatacaatatgaacaacgggttttttacagacttttacgactcacaggccgcttcaaaggatgtgacgctttcatacgtcatgcctgatgccttagctgtcttaaagaagaatggaatcatagacgaagaaacagaacagcggaatgccaatgttctctattcagctcctttaaaaaatggctttctgccgaagacatacagctcggagacgaaggaatacacatatgatagtgaaatcaacctgattgatcagctttacgctgcttggcatttgccggaaggggatgaaaaagcatctgttttagcggactggatcaagcaggaatttcagaaaaacggaaagctgtacgggcggtattcggcagatacgaaggagcctgccgtccaatatgagtctccatccgtatatgccttagccgtattgtttttgacaaaacagcatgaaaacagttctgtcatcaaagccatatatgacagaatgaatgactttgaaattcatgatccggtgaaatcgtattatggaggctatatgagcggcactcagacgcattcatttgacaatctgctgccgctgttagccgaaaggaagctttttaatgaaaatatcattcagtgaatcacaaaaattatttgcttatttttcagggctcatcgcggccctgtctttgtttatttattatgtgtcagcccagcaatcagaaggtgctctgatccttttcatcacatttggcgtcatcgccgcaggcatctggttcggcccgatttacgcgctggcagtgaccttaatcgtactctttgttctcggcaccttaatgatgtttttccagactggacagacatcgctctttccggctgaggaagggctgcgaatgcttgtcgtgtggggaatcgcgcttttgctgttttcttttatttctggaagaatccacgatattacagcagagcttcggcgctcaataacacggcttcaatccgaaatcaaaagctatgttgctgttgacagagtgactggttttgataacaagcaaaggatgaatctggaactttcagaagaaatcaagcgggcggagcgctacggcaattcttttgtgtttttgctgctccatatgcattatttcaaagagtttaagtctttgtacggtgaaaaagaaacggaccgcctcttccaatatgtcggtcagcaaatcaggacaagcgttcgggaaacggataagaaattccgtccctctgacgagcgtatcgggatcgtgctgacgcacacgcctgctgaacatatgccggccgttctgaccaagctgaagaaacaattggatacatatcagctggaaaatggaaagtatgtgtcgcttacgttccacgtttgctatttgccctaccgcaacgatatcaaaacagctgatcaatttttagaagaactggaaaacgagatgatgatgaatgaactataaaggaatcacattgctatgcgtcatgatgcttctttttttagctattgcgtcttttcccgtttctgcgcaagcgaaagatcaggatgccggcattctcatcatctactcaaccttggacggcaaagagtcgtcacaagtcaaaatgctcgatttgcttgcgggccactttacatcccatgtgacagtcaaaaaagattcagacgttgaagcgtcggatctcaaagggaaagaccatgtgatttattacggccaaacgaaaagaaagctcagcaaaaaattgctgtctcttatcagcggcgtaaaaaaaccggttgtcgccattggctataacgcaggccaaatcagccaattttccggtctttcattagcccgcaaagaaaatgtgtttcaggttcacagcaggtcggaaaaggccgatgtgtctctggaaagcgggcttaacgtgctgagtgtatcaggcctgaaaggaacggcgctttacaccttcaaagccgatgacggcacaacgcattcttttatatggaaaacaaaaaaagggaatgtgtacattggattaacaaatttgttaaatgacaatttgatcgtggcgaaacagctcagagaagctttcggagagaaggcggggacgacgttattgtatttgcgtctcgaggatatcagcccgatgtctgatgaaaaattgctgcttcaagccggtacatacctgcataagcggcatattccttttatcctggcggtcattccggtttatttgaatccggaaacaggcgacaaagtgtatttgtctgatcaaccgaagatggtcaaggtgctgaagaagctgcaaagcatgggcggcagtatcattgttcacggctatactcacgcttatcgctacagtgaaacaggagagggctttgaattttgggatgcaaaggcggatcagccgattacatccggaaatgccgaagaccccccgtccattttggagaaagaacaggacttcccgaacgaacaagcctatcacagctatctcgaaccatttcgggaaaaggaagaaacgtatacaaaacaaaaactgacgcgtgccattgaggatttgacatcatcgggtctttacccgctggcgtttgaagcgccgcattacacgatgtccgaatatggctatcaaatcgcctcgcagtattttacaagcattttcggccaggtccagctcagcagcacaacatggaaaacatccggtgcacctccgtttgtgactgctccttcgatgttgcacggaatgacgctttatccggaaacgatcggctttgtcgacacatcgaagcaaaactcgctcggtgagatggaggagcacatctcccagatgattgattttgaaggcggagtagccggaggattttatcacccgtacctcgggatgaaatatctgccggagctggttgatcagatggaacgcattccagacagtgaatggcttgatttaaagaaaacgaaacaaaccgtcaaaacagacaaagtggaaattcatacaagcggtgacggaacgattcaggtgaaaaacggcgtaagcgcgattgacgagtttttcgatcatcaccggcaaacccctctggaaaaggcgttatggattctctccgctgttgtgctcttatttgtcatcatgtttgtcagttatacgttttacttgagagccacattgaaaaaacgaatttttaaggagagaagaagccttgggtaatacgctgttctttatctcgctaagtttaatatgggttatgcttctctaccacatgttcctcatgcagggcgggtttcgccactatatgaccttcgaacggaatatcccgaagtggagagaaaatatgaaggaactgccgaaggtcagcgtcctcatcccggcgcataacgaagaggttgtgattcggcagacgctgaaggccatggtcaacctttattatccgaaggaccggctggagattatcgtcgttaatgataattcatcagaccggacgggtgatatcgtcaatgaattttccgagaaatacgatttcatcaaaatggtgattacgaagccgccaaatgcaggaaaaggaaaatcctctgcacttaactcgggttttgccgaatcgaacggcgatgtgatctgtgtgtatgacgccgacaacacgcctgagaaaatggctgtgtattaccttgtgctcggcctgatgaatgacgaaaaggcaggcgccgtggtagggaaattccgtgtcatcaatgcggcaaagacgctgctgacgaggtttattaatatcgaaacgatctgttttcagtggatggcccagggaggcagatggaagtggttcaaaatcgccacgatcccaggcaccaacttcgcgatccgcagaagcattatcgaaaagctcggaggctgggatgacaaagcgctcgctgaggatactgagctgaccatccgggtatataatctcggctatcacatccgctttttccctgccgccatcacgtgggagcaggaaccggaaacatggaaggtatggtggcgccagcgcacccgatgggcgcgcggcaatcaatatgtcgtgctcaaatttttggcgcagttttttaagctgaaacgaaaacaaattatctttgatttgttttattttttctttacgtacttcctgtttttctttggcgtgatcatgtcaaatgcgatttttgtagtgaatttgttttatgatttgcatttgtctgttggatttttggcaatgattctctggattttggcgtttttcttatttatgacagaggtcatgattacgttgagcattgaaaaaacagaaatgaacaagcaaaacttttttatcgtatttctcatgtacttcacatactcgcaggcatggattgtgcttgttatctactctttattcgtagaaatcaagcaccgtttattcaagcaagaggtcaaatggtacaagacagaacgatacaatcaacataaaagcgggtgacctttttgaaacaaataatgatttttctcacaagcttcatgctgctggcgatgactggacaaacggctcttgccaaagacgtacaggtcagcggttcgctcctcgggaaaagcagccaagaacaagccaaacagcaggtgctgacaagcgagttgattacactgtatggatcaaaagacagcgcagagctgacgtaccagatcccggcaggcgcctcttcgggcaatcagcaattggtaatcgaatacgaggcatcaaatcttttaatttctccatcatcgttaacggctgtcattgatgatgaaccggtcaagacgttaaagcttgatggtgattccaaacggaaaacagtgaagctgaatctgaataaaagccagtctgcgcaaggctatcacaacgtatcgctgaaattctacggcgtaatgaaagagggcgtgtgcgtcagacaggatacatcaggcaactggatcaaaatttatccggacagccggctgacacttgctgacagcagtgaagcgaagggaacgtcgctggaccattatccgtatcctttcgcccaatctggaaatacagcggaagaaacagctatcgtcattccggataacccaagttcagcagaaatagaagctgctgttaaaacagaaggctatttgaaaacggtggacagcagtgtcagtattgcgtatgtcacggaatctgaactgaaaaaaatcgataagccgacgattgttatcggcgtggacaagcattggaacggcaaagtgaaaaaactgttgaaacaagctgggctacaggcaaaaggagaaaaccttctgcttgcggagcgggtgctgaaagcagagggcaaacagcagccggttctgtttgcgcaagcggcgtccgaggacgcgctcactaaaaaaatcagcgtgatgacagatcagacatatacaggccagctcagcggcgatacactttcaatcagcaagcttcagcagactgaaaaaaaagaaagcgataagctgacccttgagaattttggagcgggtgatatcacaattggagccgacaaaacatcttcagcacattatttttatccggcttcggctgttttagatgaaaaccaatcggcgaagctgtcgcttaaactgaaaaagtctgaaacgattcaagcctcagcgactgaaaacgagtctgcctctcaggccgcagaactgaaagtgatgatcaacggccagccgcactcggtccgacttgatgaattaggaaaagaagataaaaacggattctatcatgtcacagtgaaagtggaccctaaactgctgcaaaaaaaccgctacattgatattcagttcgtcacgaccggcttaaaggaaaacaacccttgcaacaccactgatgaggaaaagtgggtttttatcgataaaaacagtacattatcatacgccatcaaaggcatgtctccgtcagcggattttcaagagtggccgcttccttacgccggaaaccaggatcaaacaacattaatcgtgcttcctgacaccgtaagccaatcgaagcttgaggagctttctctcgtaacggaatcctttggcagcgaagcacagcattcatatacagtaaagaaatcatctgacgttacagcaaaggatgcgaaaggacgaaacctcattttcataggagggatcaatcaattttctcttctgaaggagaaatcatcagatctgcttgtgccgcaggagaagaacggctcgtttgatgtatctggtttcgagatgctgaatgagacgacaaaacaagtggtatttacccaagcatcggtttgggattcacgctatacaatggcagtctttgcaccgtcaaaaggagatggaacggctgtcacaaaagagatcatcagttatctgaacagcaacgatgagtcggcaaccgtccttaatgaaacaaacagccagcaggtgtttacaaaccaccagcagctcaaatcggaaacaaacagttccgatgcagaacaaccaacacaggatcatagccagaaatggatgtatattggtgtgctggcactcattatggtggttgcggcagtgttcatttggattgccgtaagacgcagaaaaagaaagacagatacagaataaaacagaggctattttagcctctgtttttttatttttggtaagtaaattccatttgtggaacctgtcattttatttttttctctcagccaataagcctctttacaacgtgcgggaacgggagtatgatctcttttagaaaacaaatcgcttaatctgaaatcagagcgggggacccaatagaacggctttttgccgttggggtgaatcctttttaggtagggctaactctcatatgcccgaatccgtcagctaacctcgtaagcgttcgtgagaggagatgaatgaaacctgtgttcgatgttatggcacaggggcatccgtttgcctctgtgttttttgttgttcatttttgaatgcaaatcgcatacagagacatcatagcagaaaggactatcatcaacatgtgagagcaagacactgatggatgttttattgttttaattgaaaaatgagaaattaaaaggggaagacatcgatgtatcattcaatcaaacgttttttgattgggaaaccactaaaatcccaagcagctggagagcaaaaactgacgaaattaaaagccttggctatgctttcctcagatgcgctatcatctgtcgcatatgggacagaacaaattctaatcattttggcaacaatcagtgctgccgcattttggtactccattccgattgcggtgggcgttctcatcttgctgctcgcactgattctttcatacaggcaaattatttacgcttatccgcagggcggcggggcgtatatcgtttctaaagaaaatctcggtgaaaaaccgggattgattgcgggcggttcattgcttgttgattatattttaacagtagcggtaagtatttccgcaggcacggacgccatcacgtcagcctttcctgtattgcatgattatcatgtgccgatcgctatttttctcgtgttagtgattatgattttgaacctgcgcgggctttcggaatcggcatccattcttgcctaccctgtttatctgtttgtggtggcgcttttggttctcattgcagtcgggttgtttaaacttatgacaggacaaatagaccagccagcccatcatacaccgctcggcacacctgtagccggcattacgctgtttttgctgcttaaggctttttcctccggctgctcagcgttgaccggggttgaggccatttctaatgcgattcctgcattcaaaaacccgcctgcgcgaaacgcggcaagaacgcttgcgatgatggggattttgctggcgattctgttttccggcatcacggtgctcgcgtacgggtatggtacggcgccgaagcctgatgaaacagtggtttcacaaattgcgtccgaaaccttcgggcggaatgtgttctactatgtcatccaaggtgtcacatcgcttattttggttcttgcggcaaatacgggattttcagccttcccgcagcttgccttcaacctggcgagagaccagtatatgccgcgaatgtttacagtcaggggcgaccgcctaggcttctcaaatgggattatctttttaggcgttgcttccattgtgctcatcctgttattcgggggacagacagagcacttaattccgttatatgctgtcggcgtatttattccatttacgctttcgcaaaccggcatgtgcatcaaatggatcaagcaaaaaccaaagggctggatcggaaaaatgctgatcaactcttgcggcgctttgatttcgtttatggttctgtcgatcctgtttgtgacgaagtttaatgttgtatggcctgttttaatctttatgcctatcgtcgttctgttgttttttgcgattaaaaatcactacaccgctgtcggcgaacagcttcgcatcgtagacaaagagccggaagaaatcaaaggcaccgttgtgattgtgcctgtggccggtgtcaccaccgtcgtacaaaaatcgattcactatgcgaaatcactgtccgatcaggtgatcgccgttcacgtgtcatttgacagagaacaggaaaagaaattcgaaaaacgctgggaagagcttaataacggcgtgcgtctcgttacgcttcactcctcgtatagaagccttgtccatccgtttgataagtttttggaaacagttgaggcgaaagcgaagaaggagcagttttccgttatggtgctgtttccgcaatttataacgaaaaaacgctggcacaccatccttcacaaccaatcagccttcctcctcagagtccggctgttctggaaaaaggacataatggttgccacactgccgtatcattttaaaaagtaaagctctaggaccaagggaatcaccttggtccttttttgcggaaaaaggaggtatggcggtgtatacacaaggtgcttttgtgatcgtactgaacgaaagtcagcaggttctgctggtgaaacgaaaagatgtccctttatgggatttgccgggcggcagggttgatcccggggaatcggctgaggaagcggcagtgcgggaggtattggaagaaacgggatacaatgcagcgctttctgcgaaaataggtgtttaccaaaggccaaagtttcaagatgaacagcatctgtttttcggaagcataacaggcggacaagcagtggctgacggcacagagacagcgggattaaagtgggtttccccggagcgtttgccgctttttatggtgccgaaccgaaaaaggcagatcaatgatttcaagaatggcgctcaagatgtaaatgtcaccgtcaaggatagagggttgctcgcggcgatcgacctgttgaaaagaagactgggcaagtgattcaggtctccgggttttaaagcctttctcctgtggtattgaaaaaaggaaaaaggaggatacgttatggcacacaaaactgcaggacaagcaatgacagagctgcttgagcaatggggagttgatcatgtatacggcatccccggagacagtataaatgagtttattgaagaattaagacacgaaagaaatcaactgaagttcattcaaactcgccacgaagaggtagcggcactggcagccgcagctgaagcaaaactcaccggcaagatcggagtctgtctgtcaatcgcagggccgggagcggtgcacttattaaatggtttatatgatgcaaaagcggacggcgcccctgtgctggcgattgcaggacaggtttcttctggcgaagtcggacgggactatttccaggagattaagctggagcaaatgtttgaggacgtggctgtgttcaacagagaggtacatagcgcagaatcacttccggatctcttaaatcaggcgatcaggaccgcctacagcaaaaaaggcgttgcggtattgagcgtgtcagatgatttgtttgcggagaaaatcaaacgggagcccgtgtatacttcaccggtgtatattgaagggaaccttgaaccgaaaaaagaacagctcgtcacctgcgcccaatatattaataacgctaagaagccgattatcctggcagggcagggaatgaaaaaggcgaaacgggagctcttagaatttgcggacaaagccgccgctccgatcgttgttacactcccggcaaagggtgttgttcccgataagcacccgcattttctcggcaacctcggtcagatcggaacaaagccggcttacgaggcaatggaggaatgtgatttattaatcatgctcggaacgtcattcccgtaccgtgattatttgccagatgacacgccggcgatacagctcgattcagacccggcaaaaatcgggccttgtctgcgattcggctctcggtctgcgcgaattgacagagtatattgaacgcaaggaagacagaagattcctaaatgcctgcacagaacatatgcagcattggtggaacgaaattgaaaaagatgagacagaggccacaacaccgcttaaacctcagcaggtcgtggcccgtcttcaggaagcggcagccgatgatgcggtgctctctgtcgatgtcggcactgtgacagtctggatggcgcgtcatttcaaaatgaacgcgaatcaggatttcatcgtctccagctggcttgcgacaatgggttgcggcctgccgggagcgatcgccgcaagcttgtccgaaccggaacgccaggcgatcgctgtctgtggtgacgggggattttccatggtcatgcaggatcttccgaccgctgtcaaatataagctcccgatcacagtcgtcattttaaacaacgaaaatcttggcatgattgagtacgagcagcaggtcaaaggcaatatcgactatgtcacaaaacttcaaaatgtcgactatgccgcatttgcagaaagctgcggagcaaagggcatcaaagtgactaaagcgggagagcttgcgccggcattccatgaggcgctgcaatctgaccaaccggtcgtagtggatgtcatgattggaaacgaaccgccgcttcctggcaaaatcacctacgggcaggcgaaaggctttagcaagtacatgctgaaaaacttcttcgaaaaccaaaaatttgaaatgccgtcactgaagaaaagtttgaaacggttattttagaggcccttttagaggcctctttttttgtgttggaaacaaatgtatttcaggttatccttgtattatattggtatgaggaggattacatgtttgagttcataaaattattgttgtatgtattaggatctgcaggaatgatctatgcgtcatatcacgattttcgccatgctcagaacgggcaaaaggacaaatgcatcttctttcaaagcaaaaagaccagcgcatttgtccttgtatgtttcatttgtttattcttatcaaatctaacagagctcttctcagtatagggttatttctcttttttcttcagcccgaagaagaaaggaaaagcagaaccgaccaagaaggtgccgaataaaaacatgccgccgataaacacgtggaaatttgtgtgtccggccgtaaacgccgtgattagggaaataatactgagcacgatcatggcaatgccgggcgcgactctcatttttcccttggatttatgggcagcaacagaacataaaatgccgataacaataggaacaatccacaaataaaacagaataaatactgacatcatcaaaactccgatttttcttctatcataacaaatttctgtcaaaaagggtatcaaagagcttttgcgaaaaaataaaaaccggctttagaagccggtttttttatcgaaacgtatctacaattaaaaacacattcaaagcaacgatcaatacagcaatcagccaagacaccactgtgacccatttggcgttgatcagagatcccatgatccgtttattgcttgtaaacataataagcggaatgagggcaaaggcgatcccgaaggacagcacgacctggctcagtacgagagcggtcgtcggattaacacctgacgcgatgatcaagatcggcggaatgatcgtgataaaacgccgtacatacagcggaatgcggtagttgataaatccttgcataatcacgtcgcctgaaagtgtgccgacagacgaactggatagaccggcaacgagcagcccgatcccgaataaagccgcagacatagggctgacaagatgtccgaattgctgaaatgcgacgtcgagatcctcaacaaacaggccgtttttgaagaataatgcggcagccacaatcagcatacttgcattaatagcccctgcaatcagcatcgctattaaaatatcaataaattcaaacctaaagatttttttccgttctgcatcagttttgccaaccacccgccgctgtgtaagggcagagtgtaaataaatggcgtgcggcataacagttgcgccaagaatacccgctgcaagaagcacactgtcggtgccatgaaacgccgggacaaaaaggcccttcatcactgacacggcatcaggctttgcgaaaaaggtctgcagcgcaaaggcgatcacgaccacaaacagcatgccggcaataccggcttcaagtgagcgataaccgcggcgctgaagctccaatatcgcgaaagaaccgatcgccgcaataatagacgcttcaagcatcggaatgccgaacagcaaatacagtcccagagccgctccgataaattccgccaggtcagttgcgataatgacaagctcgccctgaatccataatccgatcgagacaggcttcgggaattcttcacgggcaacctcaggcagatttttgcctgtcgcaataccgagtttggcggatagggattgaattaaaagggccatgatattagaaaataagatcacccataagagcatatatccgtatttagaacccgccgaaatattcgttgcgaagttgccgggatcaatataggcaatggctgctataaatgcagggccgagaaaagggagcagccctctgaatcctctgattttcccgtcaagcgcatcttggacggctttggaacggggagattgtgctgtgatgtccttgttcatcatgtctcacctgaattctgtttgtttttgccgtacaacaaagagtttccttaaggcaaattattttatctacatcatatgaccatcccggtttcttgtcaaccgaaaatgttcaaaatacacttctgaatttttccctgttatgtaacatgatatgtaggaattcgggataaggtcccatataaaaagacatcgtttcagttcgaaacgatgcctcctgtatctaatgagtctaggcttccttccgcagcccgcggaatataaggcccagcaagaacacgaagatggctgccccgatgatggccgggaaaatagcaaagccggcgaggctcggtccccatgtgccaagaagtccgtgcccaatccaagcgccgatcagcccggcaatcatagagccgaaaattcctcccggcagccggtttcctacaatggcgctcccaattaatccgataacaattgcaacaactaatgaaaccaaaaagctaagcatcatgatcacctctcataaatgatttaccaatcaataaccgctcctgatcatttcgaaacacttaaaagcatattcctttatgatcctgttttaatctttctctgcacactgccgtcagctaaatgaacaatgacctcagtgcctttatgcgccgcgatttcctttgcccgttcaatcgcttctttctttgtatctttgatttcagacacacgtttggcgccctcggctttgactgcccagccttttttatgcttaataacatgctctgctttattcatgagctcggggccgctgccgctgcttggatcagcatcgcgttctgtctcatcatcatgcgtcaggaaatcatcaatttcatctgtagaggcgttttccgcccattccttcgctttgcttgtcgcaattggaatcgcgcgcccttcctcatagccttcatcaatcatcgcattcgcaatgtctatcgccttttttctcaccggcttctcaagattttttaatgaagcaggataatccttcatcgaccaaggcatgtccatcactccttttccttttataaaaatggtacccgcaggtgaaaaataaaaacgcatccgaaaaaatgaaggtatactatatagtagaaaaaacggaagggaagtgcggattgggtgccaacagaacgaaaagaagacttacatcagcaattaaaagagatagagaaatgggaaaaagatcagcaaaaagtctggttttgggaaaagctcagccgtctcccgtttcaactcctggacaagctgacaccagaattcatccagaaaaagatcggcaagctcttggatgaggtcggcagctttgttcaaacaggcggacagtacctgacatctgaaaaacagattatcaggatatttcaaaagaaactgccggaggagatctttgaatcgctggaggacatccggaaggcgcctctttctgtcatggatgaaattgcggaaggaatgggcaaaaatagaaccaacgcagcaaccgttcaaggcgcgacaaccggtgtgggcggcgtgtttacgctggcggcagacattccggcagtgcttggcttatcactaaaaacattacaggatatcgcagtcgcatacggctatgacccaaaggagaaaaaagaacgagtcttcattgtgaaatgcctgcagcttacgtcggctgatgttgtcggcaaaagatcgattttgcaggaattaaaacactacgatcaagaccgtacatataagaatgtcgcttctcaaatccaaggctggcgagaagtcgttttgggctatcgagacacgtttggctggaaaaaacttttccagatggtgccggttgccggaatggtttttggcgccgctgccaatcgctcaacattaaacgacattaccgagacaggcatgatgctgtacaaaaagaggcgcattcttgaacgactgaaagaaacagaacgagagatggaatagcagaaagcagacggacaccgcgatccgcctgctttttttagtggaaacatacccaatgtgttttgtttgtttaaaagaattgtgagcgggaatacaacaaccaacaccaattaaaggaggaattcaaaatggcagacaataacaaaatgagcagagaagaagcaggtagaaaaggcggagaaacaacaagcaagaaccatgacaaagaattctatcaagagattggtcaaaaaggcggagaagccaccagcaaaaaccatgacaaagaattctatcaggaaatcggcgaaaaaggcggagaagccactagcaagaaccatgacaaagagttctatcaagaaatcggtgaaaaaggcggagaagccactagcgaaaatcatgacaaagaattctatcaagaaatcggccgaaaaggcggagaggcaacaagcaaaaatcatgataaagaattctaccaagaaattggctcaaaaggcggaaacgcccgcaacaacgactaatcaaaaacataaaggcagacaacctgtaaataaaaaagcgatccggcacatcagctggatcgcttttttttggaatcttctcaatttatgccactattgcgatacaataagtgaaaaaggggttttcgctaatgtccaagatgcaaaacttgctcgccatcgcaaatgaagtcaaagaaaagcacgccaatttttcaatctcagaggtcaacgaccactgcgtgcgccttgcggtgtttacgggagaatatgactggcaccatcaccctgactcagacgaattgtttattgttcttgaaggggagctgctgatcgattttaaggacaaagaaaccgcggtgctcaaagcaaatgacagcctgctgatcccgaaaggcacggttcaccgcacacgctcttacgtcagaacggtaaatctctgtgtggagcataaacaagccgaaaccgtcatcatagaggagcagccatgctaatcaaaaagatgatatgtgaagtagacgctgcaaacgctgaagcatttgcaaaagcgcagtcacagtgggaagcattatcgcatataagcggctttatcaaacaggccggcggctggcgaaaaacgatagacgagccgctcaccgcagaaatcatcagtgtatgggaaaacagagaagcctatgatcattttatggagaacgaacatgacagcatatacgaggaaaacgatcagaaggctgtaattctttcgatagaggtgacggtgtacgaagaggataaaccgttcgtttatgatctgttacataaccccgatatccggtacgaaccaaactggacggttctgaaggcataatcaaagcccaaaacatcatattttgggcttgtctctttactcgcgtcccggaagtgtattatgaacaaaaggcggtgctggttttaactccggtttttctccaaacgtttttgcttctttcacatattcaaaggcttctccgtccggcgctttttcattcagccagttttgctcggcgctttcttcgccttcagagaaattgataagctgatgtgagaactcttgtttttcgagcgctttcgggaatgtacccggcacaaccggaccttcctgtgcttctaattctttaatggcggcaagccattggttctggtgcattgtgtcacgcgccagcaggaagctgagcatatctttgacgcctttgtcatccgtcatttcaaacaggcgtgcgacctgcagacggccctgtgattctgcattcaggttggcgcggaagtctgccagcaggtttccgcttgctacgatataaccgccgctccaaggtacgcctgtactgctttccggcatggcgccaagtcctgatacaatcgcatggtgagggttcatgccgcctaggatggagccgatgaccggatcttcagcagctttttcctgctgatcaagaggggcattctcaagaagtctggcaatcatcgttgcgatcatttcaacatgcccgagctcctcagttgccgtatccatcagcaagtccttgtatttttcatttcctcttgtgttccagccttgaaataagtactgcatggcaactgaaatttctccgaattgcccgcctaaaatttcttgcatttttttagcgaataatggatctggacgatctggtttagcaggatgctgcagcatttttgtgtgcttaaacatgtacccatctcctttttcgattatctctttttatatttccgatcgatagaaagataaacgaaaaacagcgtatcgagatgggaactatgaatcttttcgcagctccaacagttcccggatcagctcccggccgaagatgggctcatactgccggtaaacagggtcaagacgcttcatccattcttgtttctctttatctgacagctcataaatatgtatagcagaattctttttgatttcttccagctgctccttgttcatttgttcggcatacgtttcattccactccgtcgtctccttcatcgcttcagtcaaaatgcgccttgtttctggtgtttgcgccttccagaagtgttcatcagtcatgacagcgtagccgagataaccgtggctgcttattgtcaaatagtcctgaacattataaaattttttagaatagatgtttgaaattgtattttcttcgccatcgactacattgttttctaacagctgaaaggtagaattgaaggattcctgatgaggtgttgcaccaagcagcttgaactgatcctcaatcacatcgctttgcataatgcgcagatgctgcccttttaaatcatccggtgttttgaccggcccttgatttgttgtgatttgcttaaagccgttcgtccaataggccagtccttttaattggtttttctttagagaatcaaacagctgtgtgccgatgcttccgttcagcccttttttggcggcgttgtaatctgtaaaagcatacggcagatcaagcactccccattcaggcgagagcatgccgagcttcgatgtggagggggcgataaattgaacatcgccgttttgcaatgcttcaatttcttcaatgtccgagtacaggcttccattgggaaatacttctatttttattttcccgcctgatttttcgttcaccagatcagcgaatttattggcggcaagcccttttggcgtattttcagcaaccacgtggctgaatttaaacacgatttgatcctgcaggccttcctggtcgtcatcataaacaatctttttattgcctgtatgatcatggaatccgataaataaagcggttgcaattccagcgatcatcagtgcgagacatgcaagcaaactcttcatgaaaagccctcccctatgttaaggataatgggggcaatgacattcgtaaagacctgaaaggagaagctgatgaacaaaaagaagctctcaatccgttggaaaatcacgatcttatcctatatactcgtcattttctcctttttgatcggcggcattgtgctcatcggcaacattcagcatacagaggagcgggagctgaaaaagcggctgatgaatacggcccggacggtgtcagagatgacagaagtgaaagaagccttggcgcgaaaaaaacaaacagaagctgttcgccatgcggttgaagaaatcaggatgattaatgaagcagactatattgtcgtcatggatatgaatcacatccgatatacgcatcctgtcagcacaagcatcggcaagaaatcagaaggtgcagacgaggaggcagcgtttgcggagcacatttatttctctgaagcaaagggcgagctcggcacggcggttcgcgctttttatccggttaaggatcaagacctgaaccaaataggcgtggtgcttgtcggaaaaacgctgccagggatcgctgacatcctgcttcatttaaagcgtgatatcgccttcatcgttgtgctgacactcggctttggccttgctggttcctttttgctggcccgccatatcaaaaaacaaatgtttcagcttgaaccccatgagattgtccgaatgtatgaagaacggacagcgacgtttcactcgatgaatgaaggggtgatcgctattgacaatcggctcgtcattacgatttttaatgaaaaagcgaaacagatctttgaagtgcagggggatctgatcggcaaggtgatttgggaggttctcaaggattcgcgcctgcctgaaatcgtggagcggaacaaagcggtttataatgaagaaattcgtgtcagcggaaaagtcatcatgagcagcagaattccgatcgtcatgaagaaaaaagtgatcggcgccgttgcgatttttcaggacagaacggaagcggccaagatggcagaggaattgactggtgtcagaaactttgtggaggcgctccgtgtccaaaaccatgagcatatgaataagctgcacacgatcgccggcctcatccagctggggaaatctgaaaaagccttgcagcttgcattccaggcgtcaactgagcaggaaaatgtgactgaatttctgcaccgctcgattcaaaatgacgctgcggcaggccttctattaagtaaaatcagaaggggaagagagctcggcattgctgttcatatagatgaaaacagcagtcttcagcaatttcccgagcatgttgatcagcatgatattgtcgtgcttttggggaatctgattgaaaatgccttcggctcatttgaaaccgttcaatctgaagacaaacgaattgacattagtatcgaacaaacagatgatatccttgctattttaatagaagataacggctgcggaattgatccggcacatatgcctcgcctttacgacaaaggttttacggtcaataaaactggcggcacaggctatggcctgtatctagtgaaacaaatcatagacaaaggatcgggcacgatagaagttgattcacatgcggggcaggggacatctttttctatcgtttttccaatgaagggggaggaagcacagcatggctcgtaaagaatggaaggttctgctcattgaagacgatccgatggttcaagaggtcaataaggatttcattacaactgttaaaggcgttactgtctgtgcaacggcaggaaacggagaggaaggcatgaagctgatcaaagaagaacagccggatctcgtcattctcgatgtgtacatgccgaaaaaagacggcatcaagaccttgcaggagatcagaaagcaaaagcttgaagtggatgtcattgtcgtctccgctgcaaaagacaaggaaacgatctcactcatgctgcaaaacggggcgattgactatatcttaaagccgtttaagcttgagcgaatgagacaggcgctcgaaaagtacaagcaatataaacaaaaaatcgaagcgaatgatacgctgtcccaggaacagctcgatgcgatcctgaatattccgcagcaggccgtacaggatctgccgaaagggttgaatcacttcacgatgaatgaagtcactgcttttttgaaacagcaaaccgcatccctttctgctgaagaggtcgccaaggcgcttggcatcgccagagtgacagccagacgatatcttgattacttagaaaaaaccgggatcatcaaattggacgttcaatacggcggagtcggccggccggtcaaccgctacgtgttaaaaggataaacctgagaccaaaaagaccaaaatgtccgttatgatcataaacttccccagacattatgaaaacgctatcattatagtaagaaagacacaaaaggcgaataggacagggggatgaaggatatgaaactgtttaaaaatttaacagttcaggtcataaccgcggtcatcatcggggtcattgtcgggctggtctggccggatgtcggcaaagaaatgaaaccgcttggcgatacatttatcaacgctgttaaaatggtgattgcaccaattattttcttcacaatcgttctcgggattgcaaaaatgggcgatatgaagaaggttggaaaagtagggggaaaagcgtttatctatttcgaggttgtcaccaccctcgcactcattatcggtttatttgtcgtcaatattatgaagccgggtgcgggtcttgattacagcaagcttgaaaagggtgatgtatcacaatacacgcaaaatggcggtcagggaatcgactggattgaatttgttacacacattgttccatccaacatggttgatgccttcgcaaaaggggacattttgcaggtcttattcttttctattcttttcggagtgggtcttgcggcattaggcgaaaaaggaaaaagcgtcattgatttcttcgacaaggtttctcacgtttttttcaaaattatcggctacattatgcgtgccgcgccaatcggggcattcggggcgatggcgtatacaatcggacacttcgggctcgattccatcaaaccgctggcaagcttaatgatgtctgtttatattacgatgttcctgttcgtatttgttgctttaaatatcatctgcaagctttacggattcagcctgtggaattaccttcgcttcattaaggatgagcttctgatcgtgcttggcacaagctcttccgaatcggtgcttcctcgtatgatggataaaatggagcgctacggctgttccaaatccgttgtcgggctagttattccgacgggctattcgtttaacctcgacggcacatccatctatttatcaatggcgactgtctttttggcacaggtgtttggggtagacctcagcatcggccagcaaattacgattatcctcgttctgatgctgacatcgaagggagcggcaggtgtgacgggaagcggatttatcgtccttgcctcaacgctgtcagcgctgcaggtcatcccgctggagggtcttgcactcctgctaggggttgaccgattcatgagtgaaggaagagccattgtgaacctgatcggaaacggaatcgccacgatcattgttgccaaaagcgaaaatgaatttgatgaagcaaaaagcgtagaggctgtggaaggcatgaaaaaaatgaaaacagcagtctgaaaaaagaacggcccatccatggggccgtttttttaattgtttaagaattattaaggtaaggacagagacctcagcatttttttgttatataatttacaaatggatactatattgaatgaaggacgtttgtcctaacaggagtgtataaatggccgctttagttaaattttttcagcacccgggagtaaggcgtttctccatctttgtcgtgttaactggtgtgttatatctatttaagagcatgatcaacttaatattgcttaccttcattttcacatttctaatggatcgtttggagcttgtcgtgcggcagtttgtaagccagttcttccgcgtgagccagcgggttgtcattacgtttctttacatgttgctggctgtgctgcttacagtcgggggctttgtgttttatccggtcgtcgcggcacagatccagcagctggtaaagcagattaaacatattgcgtatcatcctgacagcatccctttctttgatgagatcaccagtgtcttcggagatattaacatcagttcatatgtcaaagagggcttcaatgtagtgtatacgtatctggccgatatcagcacattcggcttgcaggtcgtgatggcgctcattctcagcatgtttttcttatttgagaaaaaacggctttctgaattcatggcgaaatttaaaacgagcaaactgagggtcttttatgaggagattgcttttttcggaagcaaatttgcaagaacgttcggcaaggtgctcgaggctcaatttatcattgcgctcgtcaactgtattctgacgtttatcgcgctttggattatgcattttccgcagctgtttgggctgtcgattatggtgttcttccttggattgatccctgtagcaggcgtcgtcatttccctgattccgctcagcattatcgcctacagcactggcggtggaatgtatgtgctctacattgttcttgtcatattcgccattcatgcgatcgaaacctatttcttaaatccgaagctgatgtcggcgaaaacagagttgccaatctttttcaccttcacagtactcattttctctgaacacttcttcggcatttggggtttaattatcgggattccgatctttgtgtttctccttgatattctggatgtcaccaacaaggaagataggtctaaaggtccccgagagaatagcgataaaaagtagtttaaaatcgaataatgagtgtgcctcgatctgccggcctgcctgttcagggcatggaattaagactcggaatcggagtttggcattgcttcgcacagtggtgaacacaacaggtgacaatgcctgtcatcattacagaaactgaaaagaacaaacagtcggagcaaacgctcatcatcggtttaaccaaacatttggaagcaacaaatgctataatacaaacagtgcctaatgttgggcactgtttattttttgtcgaaaaaggaggaaggctttatggctgagccgattttacatattgaaggcctcgataaaaagattgggtctaaacagattttaaaacagatcagcatggacgttatggagggcgaaatcatcggcctgctcggtccaaatggttccgggaaaacaacactcatccgtatcatcgtcgggctgctgaaacaaaacagcggaagcgtgacaatcagcggattccagcatgatacagagtttgaaaaagcgatggaagcggttggagcaattgttgagaaccctgagttctatccgtacctgacaggctgggaaaacctcaagcactttgcgaatatgcacaaaaaaatagcggatggacggcttgatgaagtggtagaacgtgtcgggctgacgtcagcgattcatgataaggtgaaaacctattcccttgggatgcgccagcgtctgggaatcgcccaggcaattcttcaccggccgaagcttctcattctagatgaaccgacaaacggactcgatcctgcggggatgaaggattttcgcaatcatgttaaggaactcgcagaaatggaaggaacagctgtcctgttcgccactcatttattgcgcgaggttgaagacttgtgcgaccgtgtcatcatcattcaaaaaggtgagatcaaagcggaagtcagcttacaaggaactgatcaaaccacagaaaaagcaattatagaagtgcagccgcaagaaaaagcgctcaattggcttacaggcaatcaatatcaagctgagagccaagacgggacgattgtagttgaggtggcaaaagaaaacataccggagctgaaccgatcacttgtcggacaagatctgaatgtattttccattacgccttacacgcagtcactggaagacgaatttataaaagcgacaacagctcatcaagaggagggagaagagcttgtctaaattaatttggaatgaacatatgaaactttttaatcggaaggtcactttggtttctcttatcctgatggctgtctttcaattcttcatggcattgatcattaaacggattgtcatcagtgccggaacagatgaaaacttcatcggctatttatcgtatacaccgagcctgaacattttgctgcaggctttaacgatcgtaattgcagcaacaattgtttcgatggaatttgataaaaagacgatcaaatttttgctcattcgtccggttaaacgccaaaaggtcttttggtcaaaattaatcacagtcgtgatggtcagcttctatttgtatctggcatactacattctcgcattattattcggtctcgtgttttttggcacatcggtgactgcggaatcaaagacattgctggtcaacaccttggcgctgatcgggtcaaactggcttgaagctgtaatgatgggattattcgggctgctttgttcttcgctgttccgcaacagcgcggtagcagttgttgtttcttttgtcgttttatacggagcgagtacacttgttcagctcatgaagttgtttgaaaacaagtggggcagctttttgctttttgcgaacactgactttacgcaatacagaagcggagagacagcgttgttttcaggcatgacgccattgttttcaattggaattctcatcatacatgccatattcttcatcgttgttggctggtggtgcttctgtaaacgggatgttcgggtctaaaggcaaggaatgacatttttgtgaaaaagctcacgtaaatcaatatcatttgatattttggtttatactaaaggtactgacggaggtgtctcgattgaggaactttattaccgctttaccgatcatattgctgcttggattctcatttgtgtctttcatgtttcagtttgaacatcttgtttatttcaggctcgcgcttgggttgttttctctcgtgggactgtacatgatatataaaatgaagacgggcatccgctattttatcatctatctgtatgccagctggattgtgttggccgcagtgaccgcttttgaagagccgattttctcaagctttttctttggcggcctggtgatgaccatgggttacctgacatatatgctgatttatctcggcatgaaacaagaccgggatgcaaatcctgtgtaatcgcgctgttcccttggggaacggcgtgtttttctatactgggcaaaaggttaacagttgcggaaaaatggcagggaatctataatacatattaaatttatcggaattaaaactggggggctgccggatgtcattatttatacaaaacgatcaacagcggcaatggatggagaaaatcggacggattgcggatgaatttcagcaaacagctgctgaagatgacgaacagggacgttttcctgcagagaaaatacaaaaactgcgtgatgctgggtatacagcattaacattgccggcatctcatggcggagggggcatttctgtttacgatatgctcctgtttcaagaacggcttgcacggggagatgcttcgacggctcttagcatcggctggcatttgagcgtgatcggggagcttggagaaggcaacagctgggatgaagacgtatttgcatttgttgccaaggaagtccaaaacggagccgtcattaacagggcggcgactgaagcgaaaaccggaagcccgacaagaggagggcgtccgggtacacacgccgtcaaaaaggatggcaaatgggcagtgaacgggagaaaaacctttacgacgatgtcacaagctctggattattttttagtaaccgcatggattgaagacaaacaaacaacaggcgtgtttctcattcataaagatgatcccggcttgtcgattgaagagacgtgggatatgatggcgatgcgggcgactgggagccatgaccttgtactgaacgaagtaatgcttgatgagaataagctggtggaactgcttcaagggcctcgtggagctaagccgaatggctggctgcttcacattcctgcgatttatcttggtgtggctcaagctgctcgtgactatgcagtgcaatttgcatctgagtattctccaaacagcttgaatggaccgatcaagaatgtcccggccgtacagcaaagaacaggcgaaatggagcttgaactgctcaatgccagacactttcttttccatatcgctcaattgtatgacgatccggagcggcgtccacacttgaccagcgagctcggtgcggcgaaacatatcgtcacaaacgctgcgctgtctgttgttgataaagcgatgagaattgtcggggccaaaagcctgggacgaaccaacccgcttcagcgctattaccgtgatgtgcgcgccggtcttcacaacccgccgatggatgacgccgtgatacacaagctggcagctgaagcgtttgagtcataaaaaaaagagccttaccggctctttttatgtattgttttgctcttgcagatttttttgatgcttgcggtcaattctgtcataaataacgttcatcagctttggattgcccataatcgcctctttgttttcctggatcagctgttggtaagttttcactttacgcttcggcatgctccggcgccctcctgacatgtttgtattcactttctaactccgtcagcgacaattcatacagatgacgctttgactttttgtatataccattctgtattaacagatgaatgagctgtttttttctgatttctgcagactgaggtgtcattgtgtcaccaacctccaatcaaacgatattgataatcattatcaattaacttcagtatacaatgtccgcaatagcctgtaaagatgaaaagagtcctattctttctccaatttacaaacattcaacaaatcgacaaaaagtttcccgggcaataatttgctgtcgaaatattccgcttcattgaacgcaccctgctatttttcatgttttgaaccatactatgtaatagaatggaggctggtattcaatggagcggacagaaaatctgaaaaagggagaaaaaggggcgctcctcaatatttttgcatatgtcatccttgctgttgtaaagctagttatcgggattctatatcattctgaagcgctgagagcagacgggttaaataatggaacagatattgttgcgtcagtagcagtgctgataggattgcggatttctcaaagaccggctgacagcgatcatccatacggccattatcgggctgaaacaatttcgtctcttgttgcgtcttttattatgatggcagtcggcattgaagtgttaatcggcggaggaaaagcgattgcgggcggcacaacggaaacgccaaatcttatcgcggcatggacggcgttaggcagtgctgtgtttatgtatggcatctatttatataacaaaaggctggcagcgtccattaaaagctctgccctgatggcagcggcaaaggacagcaggtcagacgcttttgtaagtgccggcgcgtttatcggtgttttttcgtcccagctgaagctgccgtggattgatccggtaacggcttttatcatcggcatcatcatttgcaaaactgcgtgggatatctttaaagacgcttcacattccttaacagacggcttccatttaaaagatcttgagccttacaaacagaccgtcggcaggatcgaaaatgtgcatcgcctaaaggatgtgaaagcgaggtatttaggcagtacagttcatatcgagatggtgattacggttgatccgaagcttacagtagaagaaggccatggagtggcggatgaagtagaagacaaaataaaacatgaacacgatgtcactcatgttcatgttcatgtagagcctgacgacataaaataaggctgtttaacgaattagcttatatgttcagataaaaattcagtcacttcttcaggcgttttggcattggcgctgtgaaggtgagctgttttttcaccgttcttgaaaataagcaggctgggaatgcccattacttggtatttttcagccaggtcaggaagctcgtccttattcagctcataccaatcgttttgattgtattcttccaaaatatcgccgatgaacatattcatgcgtgtgcagtctgggcaccaatcagcataaaactttacaatgatttctttatcggattgaatcagttcattaaattgttcgtttgttgtgatttttttcatatgtcacatctccttttcaatgccattttaatataaaataaaaaggaattacatacaaatgcattcaacatcagcatgcccaaaaataattagatcattttccggtgaaaatgataagatagtaaagatgaattgtagtgggggagtatccattgaaaacaagtctaggattagtgtacggaggaaagtcggcagaacataatgtttccctgcagacggctctggctgtaatcaaagcgctaaatactgagaagtttgatatacatccgatttatataacagaaaaaggcgaatgggtaagaggcgctcgtttaactgagcctgtttcaaatgtgaaaatgcttcaatttgagcaaggaggcagtgctttttctccagctgccctgaaccaggagatgtttccgcaggaagcgtcacagcaaaatgaagccatcgacgtcgtattcccgctcctccacggaccgaacggagaagacggtacgatccagggaatgctcgagctgttgaacattccttatgtcggcaacggagtgcttgcttcctcagccggcatggataaagttgtcatgaaacatttatttgctcaggccggccttgctcaggctaaatacgcagctttccttaagaaagactggactcgttctccgaaagaaagctgtgagcaggttgaacaggaattaggctacccttgcttcgtaaaaccggcgaacctcggctcaagtgtcggaatcagcaaatgccgaaaccgtgaagaactgcaaaaagcgtttgagcttgctttccaatatgaccgcaaagtcgtcgtcgaagaaggcattaacggccgcgagatcgaaatcggcgttcttggaaatgacgatcctaaatgctctgttgtgggggaaatcgcaccgaagacggatttctacgattacaaagcgaaatatgaggatggagatactgatctgatgattccggcgattgtgactgatgaggaatacgcaacaatcagtgatatggcgatcaaagcatttaaagcgatcgacggttcaggactcgtcagagcggactttttcctgacagctgacggcgaagttctgatcaatgaagtcaacacaatgcctggctttacacctttcagcatgttcccgctgctctggaaagaagccggagtggaatatgctgacctgattgaacagcttgtggagcttgcaaaagaacgccacgctgaaaaacaattgattaagcatacattctaatgaagaaggacactgccggtaaaagggcagtgttttttcccgtatatacaaaagaaagagagggaccttacttgattaagcgaacagtaaaaaacattgccgaaatggttaatggcacactaacaaatccgcaatatgaacaaacagtcattcatggagtggcaaccgatacaagaaaactggaacaacatcagctcttcattccgctgaaaggggaacgttttgacggccacacttttgtggagcaggcttttgaagctggtgtagcggctgttctttgggatcggtcagaaccaaatccgcccgagaatcacgccgtcattttagtggacgatacccttactgcacttcagcagcttgcaaaagcctatttgcaggagcttggcacgcgtgtcatcggagtaaccggaagcaatggcaaaacgacaacaaaagatatgattcacgccgtattggggacccagtaccgtgtccacaaaactgggggaaacttcaataatcatatcggtttgccgctgacggttttagcgatgcctgaaaatacggagatcgccgtattggagatgggaatgagcgccaaaggagaaattgacctcttgagccgactggcaaacccggatgcggcagtgattacgaatatcggcgaatcgcatatgcaagaccttggctctagagagggcatcgcggaggcgaagcttgaaatcattaacgggcttaaagaagacggagtgctgatttatatcggggacgaaccgcttcttcaaaatgcatacagctgccagacgaaaacgtacggtacgggagcgcataatgattatcagcttcaggatgtcagccagagtgaggaaggaacccattttacaatcaaagggataaaaaacacgttttttattccaatactcggcaagcacaatgtgatgaacgccatggcagcgattgctgcaggagcttattttggcatcacgcctgagggtgcggcaaaaggactgagcggcctaaaggtaaccgggatgagacttgaactcatcaaaacagacagcggcctttcgataatcaatgacgcttataatgcgagcccgacttccatgaaagctgcaattcaattgacagaaagcctcgaaggctacggcaaaaaaatgctcgtgctcggtgatatgcttgaactcggcgatcttgaagaaacgttccataaagagtgcggcgctgtgatcagccctgataaaattgaccgcgtctttacgtacggaaaactgggagcttttatcgcggaaggcgccctgaaacactttgagaaagaccgcgtcagccattacactgagaaaaaagatctcctccaagctgtgaaggaaaacgcatcaaaaggcgatttgattttattcaaagcgtccagaggtatgaagcttgaagaaatcgttaaagatttaatagagagcccgctttcgtaagaaaatattttgcgaaaaaacgcatattgcatcataaaataacatgatgtgcaaacactaatgtatgccggccgaaaattatgtatatctggccggctgcggctatgatacaatatatataggttatttcgcgatacgaacatattcgtccggacttttcatcgtgacccgaagttctccgctggattcttgggagcggatggagcagcagccggcatattcgagatgccgatctgcttctcatcttattgaaaaacaaatagtgtaatggtaagataaaacttaaagtaattcgggctttgtatacggatggatcctgtccttcttgtctaaagggcagttttataagtggtaaatcacgacattactgaaacagcaattagaaggagtttgaataatttgactataacgtttcaagattttaatttaagttctgatctcatgaaagcaattaatcgtatgggatttgaagaagcaacaccgattcaggcacaaacgataccgctcggactttcaaataaagacgtcattggacaagcgcaaacaggtacaggtaaaacagctgcgtttggtataccccttgttgaaaaaattaaccccgagtctcctaatattcaagcaatcgtaatcgcgccaacccgtgaattagccattcaagtatctgaagaattgtataaaatcggacaagataaacgtgcgaaggttcttcctatttacggcggacaggatattggacggcaaatccgggcgttaaagaagaatccgaatattattgtcggaacacctggacgtcttcttgaccacatcaaccgccgcaccattcgtttaaacaatgtaaatactgttgtaatggatgaagcggatgaaatgttgaacatgggattcattgatgatattgaatctatcctttcaaacgtgccaagcgagcatcagacacttctgttctctgccacaatgcctgcgccgatcaaacgcattgcagagcgctttatgactgagccggaacacgtaaaagtaaaagcgaaagaaatgacggtttctaacattcagcagttctatttggaagtgcaagaacgcaaaaaattcgatacactgactcgccttcttgacattcagtctcctgagcttgcgatcgtattcggacgtacaaaacgccgtgtcgatgagctggctgaagccctgaaccttcgcggatatgcagctgaaggtattcacggtgacttaacgcaggcgaaacgtatggttgcgcttcgtaaatttaaagaaggcgcaatcgaagttctagtcgcaactgatgttgccgctcgcggacttgatatctcaggtgttacacacgtatacaacttcgacgtgcctcaagatcctgaaagctacgttcaccgtatcggaagaacgggccgtgcaggaaaaacaggtatggcgatgacgttcattacaccgcgtgagaaaagcatgcttcgcgcaattgaacaaacaacaaaacgcaaaatggaccgcatgaaggagcctacacttgatgaagcgttagaaggccagcagcaggttactgttgaacgtcttcgcacgacaatcagtgaaaacaacctgaacttctacatgacagcggcagctgagctgcttgaagatcatgatgcagtaacagtggttgcggcggctatcaaaatggctacaaaagagccagacgacacaccggttcgcttaacagacgaagcgccgatggtcagcaaacgctacaagaaccagcgctcttctaaacgcagagacggtcaaggcggcggctaccgcggcggaaaagggaaaagcaacaaccgttcttcctatgacaaaaagcgttcaaacgatcgccgttcttcaggtgacagacgccagaaaaaatcttactaatttgatcgattcagagcccaaaacatgatgttttgggcttttttatgttcgcgatttgttattcagcaaattttcagctgacggaagccatttttctctgtatgcttaagaatgaaacctttctgtaaaagagacgtataaataacgacgaaaaaaagggaggtaggtatttttgagagagcagccaaaaaaccaaatcagtccagacggattaaaggtttggcgacttcaagagatcatcatatccgctgtttgcttacttattgtcattgcagttgcagtgttaagctattattttcattggccgtactggatcagcggcgtgctcggcgcggtttggctgttgggatcgattgtgacggtctttatcattccgaaggtccgtcataaggtgtggcgatatgaagtccatgaacatgaaatagatattcagtcaggtatttttgtggtaacacgtgtgattgttccgatggtcagagttcagcacgtcgatacgtcacaagggccattattaaaaaaatacaacctggcaacggtgaaaatttccacggccgcgaccgttcattcgatccccgctttagagatggaggaagcggatcggctgagagactccatttcccgtctggcgagggtgactgacgatgatgtctgaaccgaaacgcctgcacccggcagcagtcattttgaatttatgccataccattattcaaacgataaaaaatatcattctgccattcttttttgtgtatattgtcaattcaaaccatactgtccgtttttacggagccattgcgctcggtgtgctattcatctggcttgtagcggcaagcattatcaaatggagaaggtttacctatcgaattgaagatgatgaatttagaatcgaagaaggcttatttgttacgaaaaagcgatacatatcgattgatcggattcaaacgatgaatacgagcgcaggccttgtccagcaaatctttaagcttgtgaagctgcaaattgaaacagcaggcggaggcaaggaggcagaagccgttctttctgctatttctgttgaagaagcggaacgcatcaaagaagctgtctttaagaaaaaagcgcaaagacgagaaaatgaacttgatgaagaacggcttgaagctgaagaggagttggttccggccgttgaggtgcaagagcactatcgcatgaacgcgaaagaattgctcatggccgcttctacctccggcggaatcggagtcattatctccgctgtatttgcacttatttcccagcttgatgaagtgctgccaatggattggttattcgataagttttccttccttcagcacgccagcatcggtatttacgcggtactgatttttatcggtttatttatcgcctggattttcagcatcgcgggcatgatgtttagatacgcgaactttcaaatcataaaaaaagagcaggaactggtgatttcaaggggaattattgaaaaacatcaagtcacgattccattgcgaaaaatacaagccattaaaatcaaagaaaatatcattcgccagcttttcggctttgtaacggtgtccatcgtcagcgcaggaggcggcgaccgggaaaaagaagaaggcgctttgaccattctctttccaatgattcataaaaaaaagcttccgcacatgctccgaacatttacgccggaatacacgctggaagaaaactgccgccgcctgccgcggcgcgcgttgaaacgctatttgttccgttctgtcattttttcactatttttgatcatcccgttatgtatcttctttcagccatggggctatctgtcagccatcctgctgccgatagaattgttcttcggctatctcgcgtataaagaggctgcatggacgatcaacggggaccgtcttcagctgacgtctagatttataggcagaacaaccgccattgtactgaaaaaacgaatgcaggtctgcaagttcagccaatcctatttccaaaagaaaggccgcttgtataccatttctacttcggtgaaatcatcgagccatatggaagaattaacggtgagggatgtaggtgaagaggatgcagccttcattttaaactggtactcatatgaaaaagcggacggttaataccgccgctcttttttttgcacgcataaaaacgaaagaagaaacccgccgcatagtccaaacagatgggccatcatgttaatattggagttgataaacgacatgagaacggcaaatgcgagcagtgtgatgatcattttggaatgctcctgccctattagttcattgcgaaaaagaaccataaacaggtacacgccgaatagcccgaaaattgcgcctgaagcaccgacatgcacgtaatcaagcggctctgtaacataagtgccgatattgccgatgatgccggagccggcgtatacaagaagaaaacgcgcttttcccagcatgcgttccaaagccggggcaaataaaaagatggacatggaattaaacagcagatgtgtgaaaccggcgtgcagcaaaatcggtgtgatcagccgccaccattcaccgtttgcgacacctagattatagcctgtgacggtatccctccataacacaactgaatgggcaggaagtgaaaaaaacagccagagaacagcttgcaaagccaatataaaggtgacaacggggtaaagcctgataaatgtttgaaaattttcagtccgtataaacattccgagccccttttcttcattttggtatatctatagtaacacgtttatgagacaaaccatttaaatagtacgtacgcaaaggaggttatcatacatgatttacggcattgggctggacattaccgagcttaaacggatcgcctctatggctggacgccagaaaaggtttgccgagcggattttgacgcgaagcgagcttgaccaatactatgagctttcagagaaaagaaaaatcgaatttctcgcgggcagattcgcggcaaaagaagctttctcgaaagcgtttggcaccggcattgggaggcagctcagctttcaggacattgaaattaggaaagaccaaaatggcaagccctatatcatttgcacgaaactgagccaggccgccgttcacgtatcgatcactcatacaaaagaatacgctgccgcgcaggttgtgattgaaaggttgtcaagctagtctgcatattagggaaaccccactcatatatttgatagtgcattaagggagacaagttgtttgaggcttttatggtacgcatctgttctgcctaaacgtgtaccgagcgtaccgttaaagtcaaacaagcgatttcttccttttacatcaattgagaaaaaggggttgaaaaaggtgagaaaaagctttgttttgcttttaacgggactgcttgctgttcttattctttctgcctgcgggcaaaaaacacagcaagatattgtggccgggttagatgaaaaggcgaaagaatacacctcgtacaaagcaaaagcgaaaatgaccatcgagacagggagtgagcctcaagtatacaatgtggaaatctggcacaaaaagccgtctctgtacagggtttatttagaaaatccgaaaaaggaccaaaatcaagtcattttacgaaatgaaaacggagtattcgttctcacgccgtctttaaataagagcttcagatttcaaagcgattggccgaacaacagcagccaggtttatctgtttgaatcgctcgtaaaggatgttcaaaacgattcggatgcagttttcacagcgaaagaaaagaaatacgtattcgaaacaaaaacaaactatcagcataacaaaatgctgccgacgcaagaaatcacatttaacaaaaaagatatgagcccgtcatctgtcaaagtgatggataccgaccggaaagtgatggtcaaagtagaattcagcagctttgaatttaataaacaatttgataaagaatcatttgatgaaaagaaaaatatgaccctttctcaaatggatgtcgccacaagcgcgaagccttccgatacatttgcggtcaaaacgccgctggaactgccgcttggcgtcaagctgcttgaagaaaaagatatatctactgaagacgggaagcgcatcatcatgacgtacggaggagaaaaatcatttacgttaattcaggaaaaagcccagattgccaaggcttcctcctccgttacgctgaacggcgaaccggtaaatctcggctacaccatcggcgccttgtcggatgcatcattgtcatggacatatgaaggcgtagattaccttctctcttctaaagatctttctaaagaggaaatggtgacagtagcaaaaagcatgcagggacaatcatcgaaataacaacaaaggccaaacatgatttggcctttttttcgttagacatcgtttccctttagcctttaattttagtatgatatgtaaatgatattgaataaaagctaggaagtgtcgtaatgagcacaaaacctttttacagagatacgtgggcggaaattgacttgtccgcgataaaggaaaatgtcagcaatatgaaaaaacatatcggtgaacatgtccacctgatggcagttgtgaaagcaaacgcctacgggcatggtgatgcagaaacagcaaaggctgctcttgacgcaggtgcttcatgcttggccgtggctattttggatgaagcgatttcactgcgcaaaaagggcttgaaggcgcctatattggtgcttggcgcggttcccccagagtatgtggcaatcgctgctgagtatgacgtgaccttaacaggttattctgttgaatggcttcaggaggcagcccgccacacgaaaaaaggttctcttcattttcatctgaaggtcgatacggggatgaacaggcttggtgtaaaaacagaggaagaagttcagaacgtgatggccattcttgaccgtaaccctcgtttaaagtgcaaaggggtatttacccattttgcgacagcggatgaaaaagaaagaggctatttcttaatgcagtttgagcgttttaaagagctgattgctccgctgccgttaaagaatctgatggtccactgcgcgaacagcgccgccggactccggctgaaaaaaggcttttttaatgcagtcagattcggcatcggcatgtatggccttcgcccgtctgctgatatttcggacgagataccgtttcagctgcgtccggcatttaccctgcattcgacgctgtcgcatgtcaaactgatcagaaaaggcgagagcgtcagctacggagccgagtacacagcagaaaaagacacatggatcgggacggtgcctgtaggctatgcggacggctggctccgaaaattgaaagggactgacatccttgtgaagggaaaacgcttgaaaattgccggcagaatttgcatggaccaatttatggtggagctggatcaggaatatccgccgggcacaaaagtcacattaataggccggcagggggatgaatatatttccatggatgagattgcaggaaggctcgaaaccattaactatgaggtggcctgtacaataagttcccgtgttccccgtatgtttttggaaaatgggagtataatggaagtaagaaatcctttattgcaggtaaatacaagcaattaacttacctaaatggagaattcataaaacagctttgcttgaagagtgaataatggtatcattatcactggatggataaaagagtcgtatccgtaagtttggtggaggtgtatgttttttgtctgaatccagcgcaagaaccgaaatgaaaatcagcttgcccgaaaacctagtagctgaattggatggtgtagcgatgcgggagaaacgaagcagaaacgaactgatatcacaagcagtgagagcgtatgtcagcgaacgaacaactcgtcacaaccgtgatttgatgagacgcggctatatggaaatggcgaaaatcaacctgaatatttcttctgaggctcactttgcggagtgcgaggctgaaacgacagttgagcgcttagtcagcggaggataatcatttgattgtgaaacgcggcgatgtttattttgctgatttatctcctgttgttggctcagagcaaggcggggtgcgcccggttttagtgatccaaaatgacatcggaaatcgcttcagcccaactgctattgttgcagccataacagcacaaatacagaaagcgaaattaccaacccacgtcgaaatcgatgcaaaacgctacggttttgaaagagattccgttattttgctggagcaaattcggacgattgacaagcaaaggttaacggataagattactcatctggatgatgaaatgatggataaggttgatgaagccttacaaatcagtttggcactcattgatttttagacatatttgcaggttgctcaaatagagcaactttttttgttttcaaaaaacataaacgatataatagtgaaataacgaaaaaatatgttgttttttattgggaggtaagcgaatttgatgtcgaaccagactgtataccagttcattgccgaaaatcaaaatgaactgctccaactgtggactgacacactaaaagaattaagcgagcaagaatcctatcagctgactgaccaagtgtatgaaaatatatctaaagaatatatcgacattctgttgctgtctgttaaggacgaaaatgctgctgaaagccaaatcagcgaactggcgcttcgagcggtccaaatcggactgtctatgaagtttttggctactgcgtttgctgaattctggaagcgtctctacacgaaaatgaatgataagagattgccagatcaagagagcacggaattaatctggcagattgaccgctttttcagcccgattaacacagaaatttttaatcaatactcaatctcatgggaaaaaacagtatctctgcaaaaaatcgcgctgcaagagctgtctgcgccgcttatcccggtgtttgaaaatatcactgtgatgcctcttgtcggaacaattgataccgaacgcgcgaaacgaattatggaaaaccttcttaatggcgtcgtcaaacaccgttcccaagtcgtgctgattgacattacaggtgtccctgtcgtcgatacgatggttgcccatcatattattcaggcatcagaagctgtaaggcttgtcggagcaaaatgcctgctggccggaatccgcccggaaattgctcaaaccatcgtcaatttggggattgatttatcccaagttataactaagaataccctgcaaaaaggaattcaaacagcattggaaatgacggatcgaaaaatcgtttcattgggggaataacattttgagacatccgaaaatcccgatcttgaaactgtataattgcttattagtgtccattcagtgggaacttgatgaccaaacagcattaacctttcaagaagacttattaaataaaatatacgaaacaggtgctaacggagtcgtcattgacctgacatctgtggatatgattgattcatttatcgcgaaagtgctgggcgacgtcattacaatgtctaagttaatgggggctaaagtcgtcttgaccggcattcagcctgctgtggcagtgacgctgattgaacttggaatcgcacttgaggaaatcgaaactgcgctcgacttagagcaggggcttgagacattgaagcgggaattgggggaatagcgaatgaacgaccaatcctgtgtaagaatcatgacagaatgggatattgtggccgccagacagctgggacgaaacgttgcgaaagaactgggtttcggcacggtagaccaggctagaattacaacggctatttcagaattagccaggaatatttatttatatgccggcaaagggcagattggaattgaacaggtcgcagacagaggaaaaaaaggcctgaaaattatagcggaagaccaagggccgggaattcctgatatccgaaaagtcatggaagacgggttttcaacgtctggaggacttggtgcgggacttcccggggtcaaaaggctgatggatgaattcagcttaaattccgtagcgggggaaggaacagagatacaagccatcaaatggcttcggtaggaggtaagaacgtggattttagggaggttattgagcagcggtatcatcagctgcttagtcgatatatagccgaattaacagaaacatctttatatcaagcccaaaaattcagccgaaaaacaatcgagcaccaaattcctccggaagaaatcatcagcgttcacagaaaagtgctgaaggagctgtatccaagtctcccggaagatgtgtttcattcgctggattttttaatagaagtcatgattggctatggaatggcttatcaggagcatcaaacccttagagggatacagcaggaaatcaaatcagaaattgaaatcgcggcaaatgtccagcagacgcttctcggaactaaagttcctcaggaggaagcgctggatatcggcgccatcagtgttcccgctaaacagatgagcggtgattactaccactttgtcaaagacaaggaatccatcaatatcgcaatcgcggacgtgatcggaaaaggcattccagcggctttatgcatgtccatgattaaatacgcaatggactctttgccggaaacgggcatacacccttctcaagtgctgaaaaatttgaatcgtgttgttgaacaaaacgttgatgccagtatgtttattacgatgttttatgcgaattacaatatggacaagcatcaatttacatatgcttcagcgggacatgaaccgggattctattattctcaaaaagacaacacgttttacgatttagaggccaaaggactcgttctcggcatctcgcaggactatgactacaaacaattcgatcagcatctggaaaagggcgatatgattgttttattttctgacggcgtcacagaatgcagaacggaaaacggtttcttggagcgtcctgatctgcagaagctcattgaggaacatatgtgttcctccgcgcaggaaatggtcaaaaacatttatgacagcctcctcaaattgcaggattttcagcttcacgatgattttacgttaattgttttgcggagaaaggtttaacgtctgtcagacgagggtataaagcaactagtgatttgaaggaaaatttgaggtgatacgaatgaatataaatgttgatgtgaagcaaaacgagaatgatatacaagtaaacattgcaggagaaattgatgtatactcagccccggtgcttagagagaagctcgttcctctggcagaacaaggagctgacttaagaatttgcctgaaagatgtcagctacatggacagtaccggattgggcgtttttgtagggacctttaaaatggtgaaaaaacaaggcggttcgctgaaacttgaaaatctttctgaacggctgatccgactgtttgacattacaggcttgaaggacatcattgatatttctgcaaagtcagaaggtggagtgcaatgaagaataatgctgattacatcgaaatgaaagtgccggcccaacctgaatatgtgggaattataagactgacgctgtcaggggtcgcaagcagaatgggctatacgtacgatgaaattgaagacttgaaaatcgcagtcagtgaggcgtgcacaaatgcggttcagcacgcttacaaagaagataaaaatggggaagtgtcaatacgattcggtgtgtttgaagaccgtttagaggttattgtggcggatgaaggagacagctttgactttgatcaaaagcagcaggatctagggccgtacacaccttcgcacacagttgatcaattatcagaaggagggctcggtctatatttaatggaaacgctcatggatgaagtcagagtgcaaaaccactccggcgtcaccgtagcgatgacaaagtatttaaatggggagcgagttgatcatgacacaaccatcaaaaactacgaaactaactaaagatgaagtcgatcggctcataagcgattaccaaacaaagcaagatgaacaagcgcaggaaacgcttgtgcgggtgtatacaaatctggttgacatgcttgcgaaaaaatactcaaaaggcaaaagcttccacgaggatctccgccaggtcggcatgatcgggctgctaggcgcgattaagcgatacgatcctgttgtcggcaaatcgtttgaagcttttgcaatcccgacaatcatcggtgaaattaaacgtttcctcagagataaaacatggagcgttcatgtgccgagacgaattaaagaactcggtccaagaatcaaaatggcggttgatcagctgaccactgaaacacaaagatcgccgaaagtcgaagagattgccgaattcctcgatgtttctgaagaagaggttcttgaaacgatggaaatgggcaaaagctatcaagccttatccgttgaccacagcattgaagcggattcggacggaagcactgtcacgattcttgatatcgtcggatcacaggaggacggatatgagcgggtcaaccagcaattgatgctgcaaagcgtgcttcatgtcctttcagaccgtgagaaacaaatcatagaccttacgtatattcaaaacaaaagccaaaaagaaactggggacattctcggtatatctcaaatgcacgtctcgcgcttgcaacgcaaagctgtgaagaagctcagagaggccttgattgaagatccctcgatggagttaatgtaatgatccaggttgaagaaaacgagcatattcaaactctagtatatcaactgaataaagaagggaaatcgatttgcggtgacagtttttttatgaaagctgatgataaggagttaatttgcgcggttgctgacggactgggaagtggatcacttgctaacgaatcctctgcagccatcaaagacttagtggaaaactatgcgagtgaagacgtagaaagcattatcgaacgctgtaatcaggcgatgaaaaacaaaagaggcgctacagcatctatcctgaaaatcaattttgagcaaaggcagtttacgtactgctctgtcggaaatgtacggtttattctgcattccccgtctggtgaaagcttttatcctctgccgatttcgggctatttatcaggcaagccgcaaaaatacaaaacgcacaccgccacctatgaaaagggttcaaagttcattatacatacagatggactcaacgtacctgatatccgctcccatttaaaaaaaggccaatcggtagaagaaatatcgaattcgctgaaaatgtatacgacatcgagaaaagatgacctgacctatattctcggacagctgtcctagagaataagaacaagaagaagccggaatgccggcttctttttttatgtgtttttttcggtttttgatacactagagacagaacgacaaaattggaggctttggttacatggaaacgtcagcccttttaaaacagcaaattgcgaaagaaataggtttatcacaaaaacacgttgaaagtgtcatccgcctgcttgaggacggcaatacagtcccgtttattgcccggtatcgaaaagagcagacgggttcaatggatgaggttcagattcagacgatttctgaacgctggcaatacatacaaaacctgaatcagcgaaaagaagaagtcatcaggctgatcgcagagcaggataaactgacagatgatctaaaacgtaaaatcgagcaatcggtgaagcttcaggaagtggaagacctttaccgcccttataaacaaaaacgtaaaacaaaggcgacagtcgccaaaagcaaaggccttgagccgcttgccgactatatcctgacacttccccaagatgatcgtctggcagcaactgcagaccaatacatcagcgaagaaaaagaagtgtttacgcgagaagaagcgattgaaggcgccaagcacattattgcggaacaaatttcagacgagccgaccttcagaaagtggattcgccaggaaaccttcaaaagaggaaccattaagtctgcagcaggaaagtcggcagacaccgatgagaaaaatgtgtatgaaatgtattacgagtatgaagagccaattgcaaaagtcgttccgcatagggtgctggcaatgaaccgcggcgaaaaagaagacattttaaaggtagcgattgaaccgcctgcggatcacattaaggcgtatttagaaaaacaagtcatcaaaaatcgctcaacatccgtaagagagattttgcaggagacaattgatgacagctataaaaggctgatccagccggcaatcgagcgtgaaatcaggaaagagctctcagaaaaagctgatgaacaggcgattcatattttctcagagaacttgagaaaacttcttttgcagccgccgatgaaaggcaaaaccgttctcggtgttgacccagcctttcgaaccggctgtaagctcgctgtgtcagatgagactggaaaagtcttgaaaattgatgtgatctatccgcatgcgccagtcaacaaaacaaaagaagcccatgaaaaagtgaaaaagattcttgagcagtatcaagtcgagatggtggcgatcggaaacggcacagcatccagagaaacagaacaattcatcgtcaatgtactgaaagacatgccgcgcaaaatttattatgtgatcgtcaatgaagcgggtgcaagcgtctattcggcttcagagctggcccgagaagaattccctgaccttaaggttgaagagcgcagtgccgtgtctattgcgcgaagacttcaagacccgctcgcggagctcgttaaaatcgatccgaagtctgttggtgtcggacagtatcagcatgacgtcagccaaaaacgcttaaatgaatctctgcggtttgtcgtcgaaacggtcgtaaaccaggtgggagtaaacgtcaacacagcctccgtcgcgctgcttcagtatgtagcgggattatcgaagtctgtagcaggcaacgttgtcaaaaaacgtgaggaaatcggaaagttttcaaatcgaaaagaactgaaggacatcccaaggttaggtgcgaaaacctacgagcaatgtatcggtttcttaagagtgcaggaagggacagagcctttggatagaacaggcatccacccggaaagctataaagaaacaaaagcacttttgaaaaaactcggactttcaacagaacatatcggcacggcggaattgaaggacaaaatcaatcagctggcgctctctgaaacggcaaaagagctgggaatcggcgaaatcactctgaaagacatttgtgaacagctgacaaggccggaacgcgatccgcgcgatgaggtgcctaagcctttgctgaaaacagacgtccttcagctggaagatttgaaagagggaatggaactgcagggcaccgtgcgcaatgtagtggacttcggagcgtttgttgatatcggagtcaaacaagacgggcttgtgcatatctcaaaattgagcaatcaattcgtcaagcatcctcttgatgtcgtatctgtcggcgatattgtgacagtttgggttgacggcgtagatgtacaaaaaggcagagtatcgctgtctatggtaaaataaaagcactgcttacgagcagtgttttttcctatagaaataccagcattgattcagcagtttaatttggtaattatctttttcaaggaacgctttttgcatctgctttttaagccaatttggcataggctcattcctcctcagcttttatcataagagggacggtgattaccatattgtatgcgaacggtgaattgtcccgttcaatgttttttaagtgaggtgcgctatggataatatagagcttcaaaagctgacagaggatatttctaaaacatattttaaaaagccgttccgccatcaggcgctttttaatgacaggcttaaaaccacgggcggaaggtacctgttaacctctcataacattgaattgaacagaaaatatctgattgaacacggcagggaggagctgatcggcatcatcaagcacgagctctgccattatcatctccaccttgaaggaaaagggtacaagcacagagacagagattttagaatgctattgcagcaggtcaacgcgccgaggttctgtacaccccttaagaaaaaagcggaaaacaaaaaaacttatatgtatatctgtacggcctgcggccaacagtatataaagaagcgcgccatgaaccctgacagatacagatgcggaaaatgccgcggaaaaataaaaagaattttttcgtgaaaaaggttgacgaatatggcaagcctatgttacattataaaagtcgtcacgagagataaataaaaacatttacctcttgacactgcaaatcaaggctgatataataagtcttgtctcattattccacagtagctcagtggtagagctatcggctgttaaccgatcggtcgcaggttcgaatcctgcctgtggagccatattggagaagtactcaagtggctgaagaggcgcccctgctaagggtgtaggtcgcgtaagcggcgcgagggttcaaatccctccttctccgccataagatttcgatataagttctcaaccatcggcccgttggtcaagcggttaagacaccgccctttcacggcggtaacacgggttcgaatcccgtacgggtcattccatttcgttgggctatagccaagcggtaaggcaacggactttgactccgtcatgcgttggttcgaatccagctagcccagccattttttattttttgaaatctaatagtaagagccattagctcagttggtagagcatctgacttttaatcagagggtcgaaggttcgagtccttcatggctcaccatttgtatttttgcgggtgtggcggaattggcagacgcgctagacttaggatctagtgtcttacgacgtgggggttcgagtcccttcacccgcactttatttacaaagtgcacgcaaatcggttttactaggttaagagcctactaaaccagcacaaacacaatttaatgatcacgcggtcgtggcggaatggcagacgcgctaggttgagggcctagtgggtgaataacccgtggaggttcaagtcctctcggccgcatcaatgataccaagggtttagagtaccttggtattttttgtatcttttgaacagaaggtattttgtgattaaaactgaccacttacctaaagtaagtggtttgatttgtccgcaaaagtatatagttaaataagataaaaaggacatagtatatcagcatacaaaatatgttatgcctttttttgttttaataacgcatccgttattttcagcgtacaatgttactttattatggaataaaaacaagtgtctgtaagcttgcttccatctgcggataaatcatcatttcttaaagtgccttcgaatacaaacccaagtttttctggaatagcacgacttttaaggtttgttgattcacatcttatttcaattcttctaaatttaatattgtttaacccaaaatcagctaatttttttactgcttctgtcatatatccattcccgccaaatttagtatttacccagtacccaatttcacatttaggaatggtccagtcaatcctctgaaggctagttattccaataaagttattgctagctttatcaaaaataagaaaacgaaaactttccctctttaaaaaatttatatgagcatttcttaaatttatctctgtttcttcaacagtaggaagttcttgagcaaatggcaaccaggcttttaattcattaaaggaacccctaattgcttggtttacaattttcccgtctcctgtttggtgtggtgctcgaaggattagtctttctgtttccaattgtaaaggcacatctaacaataaaggattcatttgatttctcctctcggaattttatattaaagaagcaaagtaatacaaaataaagctttatgacgtgcgcaaatttagttcaatttgcgtttaatcttctaaaagatattttcgtaactgacatcatatacctattgtgagaaagtcgatgataagtatcatgagatggaaggtatgccaataaacggtgaaaatgatcgtcttggcttatcaaagaaaacaccagactatgaagaagcaaaagatgaagagacaaagttaggagtaaaacgtgtgtttactcctcttttttaattcttgggttcattttcctcattctgggtgttcgattgggtgctcttttttcggtgaatttttttcctgtcaacatctccatttgacgtctagctctggccatttcagtaggaagaatgtaaatatattcaagtatcttatttgtaaatttaaataaaggctcaaccatagtactgttaaattctatatcatcaccatgagcagctgcattccctgcctctttaatcatcttagaaagaccgcccattaaaggtggtaaaattttcttttcctctaagtcgttaagttttgcatgaagcgttcttccaatagcccctttatttttacataccatttccaaagttcttctaagagccattaggcacaccatagcatcaattttccttacatttaaagctgactcataagcagatttaatgtttttaggtaagaggtttaaattcacctgttcactatatgggaacaaaacttgaccatctttataaatatcatcaccctcgttgtatacttcttcagtattccaatgagtatgatacagttgaaattcaaaacaaacaggacactcgaacacttcaaatatgtcattaaattgggcttcataagaggttaatggtacaaatgtttttttttcatatctgtttaacaaattcataggtgccttagttccacaatgtgggcaagtgagaattgtattttctgtcattttatctccctcaatagatttttcctcgtattataacactcttgtttaaattgttaaaatttatcactaatgatttaatagttagcaaatttatatgaaatctaaggaaatagaagatctcaataatgcttatgagactataaaagaaattgagaagcaagggcaattaactggcatgttggaatactatttttacttttttaagggtatgtacgagtttaggcgtaaagaattaatttcgtgataagtgcttattgaatagctgaatcaaagttgtcagaagttgaggatgaaatagagaaagcagagttttttttcaaagtgtcctatgtatattattatatgaaacaaacatacttctccatgaattatgcaaatcgtgcactcaaaatatttagagagtatgaagagtatgctgtccagactgtacgttgtcaatttattgtagcaggaaacctaatcgattctttggaatatgaaagagccttggaacaatttttaaactctttggaaattttcaaggaaagtaacattgagcatttaattgcaatgtcacacatgaatattgggatttgttatgatgaattgaaagaatataaaaaggcttcacaacatttaaacttggctttgcaaatttttgaaaaatcaaaacatagttttctaacaaagactttattcactttaacctatgtggaagcaaaacaacaaaattatgacgttgctttgacatactttaggaaaggacgatttattgtcgataaaagtgatgacaaagaatactcagcgaaattcaaaatattagaggggttatttttttcagatggcgagactcaattaataaagaatgcattttcatatctggcttcgagaaaaatgtttgctgatgttgaaaatttttcgattgaagtcgctgattattttcatgaacaaggaaatttaatgctctctaatgaatattatcgtataagtattgaagcaagacgaaaaattaaaaaaggggagatcattaatgaaaatcaaccggattctattggcagcagtgatattaggtagtgttttatcatttggacattttattgatcaggatgttaaggcatcaatacaagtagcttctgatagagttggggcataattagataagaaagagtgaggttgaataatatactcactcttttattgattaaagtaatactcctaataatattatttcccttgatgtgctaaaattaagttatattggtacttttcatcatcattataagcttaaaaaatatggtattaatctaacagtgaaagaggaatgtaaaaatgaaagaggctaatgatcattatcctagttacggggcaaataaatttgtgtgtccaacatgtatggtgtattcacaacaaaagtggtatgagattcaaaaaaatgatatggataacgaattaattctcacagagcatttaagaacaagagggcgtgtgcctgcttatgcaagtccaaataaagaagctagtgttatacatgctatacctcaatttcacaccgataacataactgctctaagtgtgtgtatcagttgtgatcaaccggcttactggattgatggagaattagtttaccctaaaaatccaactgtgaaacctccaaattccgacatgccggaagaagtgaaaaaactttataatgaagcgagagaaataagtgtactatcacctagagcttcggcagcattacttagattagcattagaaaaattattacctttattaggtgcacaagggaagagaataaacgatatgataggtgacctagtacagaagggactttcgccgaaaatacaacaggctttagatagcttacgtgtaattggaaatgaagccgttcacccaggttcaattgatttagatgaagaaaaagaggttgcattagcgctatttaagttaataaatttagttgtagaacaaatgataaccgaaagcgatgaaatagatgagatttatagtctaattcctaaggataaacgagatgggatacaaaatagggatcaaatgaaaacaacaaaataagctaaaaaaatgaacataccacaacgatgttggtatgtttgtttattgaaagaacattcatgaataagttgaggtcataggaaaagtgtttttcttcttaaagaagtgcccattttctgcccagaattaataataaattatcaaaatcagtgtaaataatataactcgatgctatgaataatggcttttgtaaatgaagatatgattttgctaggttgagggactcgaattaaaaaagaagataccaaactatattggtatcttctttttttttgcatcagagttattaaatctttttatattgctgatgttaaattaatgtcccatttttacactaacgatgtgacttatatgataattatatacaaaaatcacttatatctagaaaattaaacaaatttacacaaaaaaggacaaaataatctttacaaattacgacaaatacttgatgttttttgtaatcaacccttattttgtgacaaatatatgaatattttgtcaccctgtaaaatatttatttattatatatatttaattcgagaggaggtcatataaagaacgaatattcgaattagtatgaatttaccgggagatagattcataaaacaattaaataatgggagtgggagtctatgagaaagggctttgtgcctaaagcttacatactgaatcttaggaaaaccctaatgatttttgcagtcttgttattgattgctggcaatgtgttgacagttttgccgaatcatattcatgctgaagataatacagaggtaactcaaagtgcagatactacttgcccagctcctgttgcgttgattaacggaagctttgaacaaggtgctgcaagaggatctgcatatgataaatccggactctattatctcgaatccgaggtacctggctggaaaacgactgatgattcctctggtcagaaggcaattgaaatatggaactatgcacagaatattccggctgttgtgaaaaattggccagcacctccggatggcaatcgctgggctgaattaaacgcttttgaaaatggcatgttgtatcaagacgtgaaaacaacgcctggacaaacgatttattggcgcttatctcatatgggacggcaaggtgttgacaccatgcaggttcgtattggggcagctactagcaatccatacagtacggtggttcaaaaacaattctctgatggaagaactgcatggggaactcatacaggttcttatactgttcaagcaggccaaacgacaacgcgattcggttttgaagctgtaagtacagcgtctggaaatataggagccggcaactttttggatgatattttccttggaacagaaccatgtgtgacggcaaataagtcagtttcaccacagggagaggtacaacccggggatgagcttacatacgcggttcaaatcaaaaatgaaggcggagacgttgctgctgatgcaagcttttcagatgcaattccagagggaactgaatatgttcctggatcattaaaattaattaacggttcgacaacaaagaatttaactgatgcagcagatggtgatgaaggcaattttgatggtaataaagtaaatgttgcattaggagatctacctaacacgaccaacttgcctaatggaatgactgtacagtttaaagtgaaagctaagacaggttatgtcggcaaagaaatttctaacaaagcgcaaataaactatgacagtctattaacgaatgcaagtaaaaaaactgaatcaaacgaagtaacgactccggttgtttttaaagatcctgtacttgaatcaaagaaaacatctgctattaaggcaaaagcggatggaaaccaagacgtggatcacccagaagttggagatacgctttcttacacgattcaaacacgaaatacaattgaagacagtcaggtgaaaaacgttaccatttcagatgcggtgccagaaggcttagaatatgttccgggctctttacaagtagatggcacatcagtcagtgatgctcatgatgatgataaggggcagtatgctgatgggaaagtatcaggacaggttggtaatataagcgataccaaatggcataatgtgacttttgaagcgaaagtgaagtccggtcaagcaggaaaggatattatcaataaggcaagcatttcaggagataatattgaaactccggatacaccgagtaatgaagtcaaagtttatccgaggaatcctgccttagagtctaagaaaacatcagcaattaaggaaaaagtggcaggaaacaagtatccggatcacccggaagtaggagacacgcttctttacacaatccaaacacgaaatactgaagaagacagtgaggctaaaaatcttacgatctcagatgctctaccaaaaggactggaatatgttccaggcactctgaaagtagacggtacagcagtcagtgacgccaaagacgatgacaaaggtgatgtgacagacggtaaagtgtcaggccaaattggtgatgtgactgatactgaatggcataatgtgacctttgaagcgaaagtaaaggccggacaagctggtgaaacaattcaaaatacggctagcgttactggaagcaacgtcgacacaccagataagccgagcaatgataccgagatttatccaagaaagccaaatgtagaatcgaagaaaactgcaagcctacaggaaaaagcagagggcaataaagatgagaaacatccagaagtaggagatacacttctttatacaatcgaaacgagaaacacaattgaagacagtctgctgaaagatctcgtcatttcagatgaacttccggacggattagaatacgtttcgggctcactcaaagtagacaataaaggagtcagtgacgccaaagacgacgataaaggtgatgtgacagatggcaaagtgtcaggtcaaattggtgatgtgactgacacagaatggcatactgttacctttgaagcgaaagtgaaagctggccaagctggtgaaacaattcaaaatacggctagcgttactggaagcaacgtcgacaccccggatactccaaaaaatgaagttgaagtttatccgaggaatcctgccttagagtcaaagaaaactgcaagtattcaagcaaaagcagagggcaataaagaagagaatcagacacaagtgggagatacacttctttatacgatccagacaagaaacacaattgaggatagtctggtgaaaaatcttgtcatctcagatgaacttccagaaggcctagagtatgtttctggaacgctaaaagtagacaataaagccgtcagcgacgcccaagatgatgataaaggcgctatgacagacggcaaagtatcgggtcaaattggtgatgtgactgatacagaatggcatactgtaacctttgaagtgaaagtgaaagctggccaaagagatcagaaaattgtgaataccgccagcgtcacaggtgacaatgttgataaaccagatacaccaagccatgaggtcaaagtttacccgaaaaatccagtcttagagtcagagaagacagcaaagaatctggattccgataaagagaagtatgaagcaggagatacgattgtttacacgatcaaaacaagaaatacagtagcagacagtaaagtaactgatctcgtcatctcagataaactgccggaaggcttagaatatgttccaggcacactcaaagtagacaataaagaagtcagtgatgcccgagatgatgataaaggcgatgtgacagacggcaaagtatcaggccagtttggcgatgtgactgatacagaatggcatactgttacatttgaagcgaaagtaaaagctggtcaagcagacaaaaaaattgtcaatacggcgagcattagcggtgataatactgataaaccggatacaccaagccaagaggtcaaggtttctccgaaagatccagttctgaagtcggaaaagtcagtaaaaaatctcgattcagataaagggaaatatgaagcgggagatacagttgtttacacgattaaaacaagaaatacagtagctgatagtaaagtaactgatcttgtcatctcagataaacttccagccggattgaagtatgtcgaaggcagcttgaaagcgagcaacggtggagaagcaaccatcaaggacggcaaaatcacagctaactttggtgacgtgactgataccgagtggcgtagtgtgacattccaagcgaaaattgagtccggatatgcggaaaaaacaattaaaaacgtggcaaccgttgacggcggcaatatcgacacaccagatacaccgggaacagacatgaaagttgatcctaaggaaccaaaactagaatcaaagaaaacagcctccattaaggaaaaagctgatggaaataaagatgaggaccatccggaatctggcgacacgcttctttacacaatccaaacccggaacacggttgatgacagccttgtcaaagatcttgtcatctcggattctcttccggaaggattagaatatgttacaggaacattgaaagtggatggtacagcagtaagtgatgatcaagacgatgatcatggatattatgccgatggtaagacgtcaggagagtttggcaatgtgaccgatacgaaatggcactctgtaacatttgaagcaaaactgaagtctggtcaagcaggtaaagatatcgtcaacactgcaaacatcagcagtgacaatatcaagacccctgacaaaccgagccatgaagtgaaggtatatccgcgaaatcctgttttagaatctgaaaaaacagtgaagaacttggattcagataaggaaaagtatgaagcaggggatacggtagtctacaccattaaaacccgaaatacagtatccgacggtaaagtagaaaacctggtgatttcagatgatcttccagccggattgaagtatgtcgaaggcagcttgaaagcgagcaacggcggagaagcaacaatcaaggatggcaagattactgctaactttggtgatgtcactgatactgagtggcatactgtgacattccaagcgaaaattgagtctggatatgaaggcaaaaccattacaaacgtggcaactgtaaatggcagcagtattgataagcctgataaaccgaaagcagagatgaatgttgtatcgaaaggttccgagaaaccaaatgaacctgctaagccaagcaaaccaacgtcagagccaagcaaaccaacacccgaaaaaacagatggaaagacaaatacaggaaaagaacttccaaatacagcaacaaatacgtataatctgatccttgttggtttggtattgttagtagcaggaactgcactttggtactttagaagaaaaagaaatgcctgatgttgcatgaagaaatatcttcctatattcatcattattgccggactcgtttttacaggttacggagtctggaaagtgatggacatcagtcataaaacagaacaaactttagatgaggcaaaacttgcattaaagagtccttctggaaaaaatgaaggctcagataaagaaggatttaagcctaagttcggagaggcagttggcattctggagattcctaaaattaacgcagagcttccgatagtagagggaaccgatgcggatgatctggaaaaaggagtcggccattacaaaggaagctattatccagatgaaaacggacaaattgttctatcaggccatcgggataccgtcttccgccgaacaggagaactaaaaaaaggtgatcaattaaaggtgaagctgccatatggaagtttttcatatgagatagacaaaacaaagattgtagaccaaaaagatacgtctattattacgctgcagcataacaaagaggagctaattctaacaacttgttacccattttcatatatcggtaatgcaccaaagcggtatattatttatggaaaacggatttgagaaatccagaatatcaaagattaggctgacgaattttcgtcagcttttttaatcatgttctttctgcattctggttcatgttaaatcatagtaatctaggttaatataaaagtattttgtatatttttataagtttactttacttttttataaggtgagtttataatttggttcaagaggtgatggtcatgaagaaagattttggtgattcgatctcaaataaggtttatgaatatcgtgtacttgccagattgtctcagcaagaattagcaaagaaagtcggggtttccaaacaaaccatctttgtaatggagaaaggaaattatgttccgactctgctgttagcttttcgaattgccgaattttttaatgtggatgtaaacgagatttttacttatgagaaaggaaatgatcaaaaatgaaaatgaattcgatcacagatacgatcaccaacgcaattttttcccctttaaagtcctgggctgaacattctccgggaaattggaatattcttattggcagtgggtttgtattgcttgtagtcggattgattctgacattcgtatttactaaaaaaatgggtaagactgacgaaagaacaaaccaaatcgctttaaatggtagcctctgtacgttatgtgcactaattttttgcgacttgcttttcccaaaagaatatatgtggcaagttttcttcttatttaagtattctattgcattcttcgcttcagcaatctatctagccgttcgatataaaaaagattttttgtaaattcaattaccgagaaagatagtgtctctgtagttgtaattgttttaggagagggaacgaatatgaaatcatttaataatgaaatttggagatgtgggaaagtatgggggttttttgctcgccaattattaaccacaattcatacaaaccgttagagatgatgtaaaatgtaatgaaaataagctttcataaccagtgctatggattgactatgttgagggcctagtggggtgaataacccgtaaaggttcaagttctctcggccgcacccccaataataccaagggtttaaccatctttggcgttattcttttgcggaaaatacggcaacaaatgtaccgcattgtggagtccactaaaaaagtgctgacctctgcacaacatcgttgcgcgagtctgcacttttattctgcgattatggggagtttattttaatccgttgttagccgcgccgatacttggcttttagaagctttttttaagtggctaaaaccaacaaattttttgccttcttcatcccataggcggaactttaacgatttaaggcttgttgccagtgtaatggtcggaacgttttgcaatggtttagtgttgttatgcactttttcaagcttatagtttgggactctcgggcttaaatgatgaacatgatgaaaaccgatattgcctgttagccactgcatgacttttggaagcttataaaaagagcttccttcaactgctgcttttacatattcccaatgctcatcttcttcaaaataagaatcctcaaacgtatgctgaatataaaacatccaaattccgagagagcctgatatcataaaaatcggcacctgaaccagcaggaagttttgccagccaatagcccaacataaaagtgctgccaaagcgacgatccccaggttcgttacatacgtattcatccgttctttgcgttttgccccttttcgattaaaacgattggcaatcccgaaaacgtaaatcggcccaataataaacataacaaacggatttctgtacaatcggtacattatttttgtcttagttgaggctttcttatattcctcaaccgtcagtacccaaatatcgcctgtaccgcgtttgtccagattgctgcttgtcgcatgatggacagaatggtcgtgtgcccaatgatcaaaaggatgcagagtcagaattcctgttaatgttccaaggattcgattcgcctttctgttcttaaaaaaggaatagtggcagcaatcatgaaagatgatgaaggttctcactaaaaaacctgccgcaacaacagaaatcgctaatgtaaggaaataagaaatcgacaagctcttatatgccaaacaccataataggaaaaatggtaccaatgtgttaatgatttgacaaatgcttttgtgtaaatcggacttttcataaggtgtaaccagttttctcaaagtccttaggttttgttctttcatattaaaaagtttccccttccctggtgatcttctaagtgtagaaaacgttttatagccttagaaggcccaacgtgatacaccccatatatgataagtatccttcccgattcatctgtgaaattattggaaatgataaactgatttccagtttattattagcagagtcagccgggatacaaaaggcgtatgaagattatacccagcactttattgggtcaaactctctcaatgctcccccatggggatcgatttatttgaccgtgaacattgattgtttgaggaaaaaaggaatgaagtaatgggtatatccatgagtgactgtttggaaacatctgcagaaacaaagttttacaagtgaacagccttgtttttaaaagattatcttgctctttaacaagaaacagctgagctaagtactattaagcaaagaaaaaggtttgaagacactcgtgattcatttttcatggtgttttcaaaccaaagtttttaataggcctcttattctgcactggtatacacatgtttaacaaataatgccatgaataaatcggaaatataatttgcagttatttccgattcctgatataataaagaagaattatttttgttcggtgtaaaggatagtatgaagattgacttttcgtcttgatgatactttgggcaaggatagtatatactgtgtggttacacactaggaggcaacaaaaatggaacaaggtacagttaaatggtttaatgcagaaaaaggttttggttttatcgaacgcgaaaatggagacgatgtattcgtacacttttctgcaatccaaagtgacggattcaaatctttagacgaaggtcaaaaagtatcgttcgacgttgagcaaggtgctcgtggagctcaagctgctaacgttcaaaaagcttaatcttcaatcgtttatacaaacaggctctttatatagggcctgtttttttatgtctatatcatactcaataaaaaaccctactcaacgttcgagtagggagatgctacaaggtatagaaaaagatttaaaacttcaaaggtttgtttacagtataacatactggattgacaatatgcggaatgtatataaattatttaatgttttgttcaaatataactctttcttttttcacgttcgttactttaagtaagattagatgaattataaaaatggtttcatctaaatgttatcaactcgcatatctcttttatgagaagaagataaacaattattattcaatgtggcagtggatataagaaattcttaaaaataatgaggagatcgattgtttttttctcctggaaataatcacttagagatacctaaaacaatgaaagccctacctctcttccatccttacggctccttgtccgtgccagtgtgaatcaggatactaaaaaaagtgactattttattgagttttttggtaaaacttcaatcttcgcagaagaaatgtaaataataaaaatggattagaatgtaggaataacaaaagaggtcgttaatgttctaaacataagttggagaagatttgcttttcatcataatattccgaaatatcttttgggatgtatctaaccaaaactttttatttgtttttcagtgattcctttaattacttccagttcactaatcaaaaattcatatgcattatccagcatttttttttcgcttgcattaagtgctttttctttcttcatacgcattaaatcacgtacaacttcagcaccttcttgtatttcacctgtttttattttgtccgtgtttattttgtacctttgcttccatggcagtaacctatcggattctccatgctgaaaaatgtgcataatgtgttttaatgcaagtatatcggtaactggtcgtatattcgaactcaatattttactcgttggaatcataactgtcatattactgattgacattcttatgacataatactgttgtttttcctctaagaattctttttcttctatggcttcaattatacctgctccgtgcattggataaacaatgttatcgccaatttgaaacatatcatccacctccatatatggtatccttcttaagattaccatatatggaggtgtaatatcaaaattttaataataacatgatcgaatttttgatgtcaataacttttttgaaaaaacagatcaagcaaaaacaatagggaacgtgtcggatttccaatcaggaaaaggtcaattgatccgtgtgagcagtttttcattggctcaatgacatcacagaaatgatttgagtagaaataagaaggaacgatatttgtgaaatgtcagctaaaaatattaaaagtacatgattaagttctaatttctttaccgatttgatatggataacggcccacttacttaatgatgcattttcacttatcttgcgaacagaaaaaggtttgtggatattgaacattttgccaccgagattggcattattatcatggaaattgacaaccttcaaatgggtattgaggtgaaaagaaaaataaagaaaggagagattataaatgaagaccagaacataaagaagtgaaggggaaagaacaaggttaattgaaaagcaaactatataaaatagtttgcttttctttttgttatgaattcacttctttttctttctctttaatgactaataaaacaccgctcagaattaaaaacgaacctatccaaaatgtcccgcctatttgttctccaagcagaatccatccgagtaaggttccaaccagaggctgaaaaaagaaaaagaggcctccacttgaggcatttaataattgtaagcctcggttccacaataaaaaagcacaagcggttgaaacaattcccaaatacaaaagaccacctagaattttagggtcaagcagttgtgatgtaaaaatggtgctaggttttacaaaaggagttagcgccacaatggcaacaaaagttgaatatgttgtaacaagtattggtgaataactgcttggaacgcgtttgatcagcactgacataagtgcccatgtaagggctgcaacaagcagagaaataccgccaagctgatgagatgtatcaatatgtccgtttcccacaataaagaatacacctatggtcgctaaaataattgaggttccttttttgatagtcaatggttctttaagtaatagacgagcaaaaataaccatgaacgctggtgtggaggacgtaataattgctcccatttgtgctgaagacaacatcgttccatattcttgtgtaacaattgaaatggtgttgccaacaattccaatggccacaattaataaaagatcgcgcttatgaattttccaagattgtttccttattaaaccaacaataagaagcgcaaggatggcgatgacatacctggtccaaaccaattcaaaaggcggaatcactgcgacaacaaccttaaccacaacatacatgccaccccagatactagcggctaaagctaaatatatagaacctaacagggtatttttcatttttttgttccctccgtatttaaaattaggtcaataaatgccctaacggagagaagtagtcactttactccattaagggcggagaagtgctactggaacatcattttcaaatagtggagctaaaaacatgttatgatcacctcgatttttaagaatgactatcattatacaatgttggttataaagccgtaaacaccttaaggggactccatttattaatagaataaactttatgaattcatttttttgtatgataatggcgtcatattcatcgcttgttgaaatttacttatgaaataactggtactgttaaatccaacttgataagacacttctgtcacattggattcagggtgttgcagtaataataagcttttttgaattctataatccattacataacgtaatggcgtcttattcagcattcgtttaaaataacggcagcactcagaacggctcagttggccagcttttgcaatgtcctctaatgtgattttttcagcataatggagatggatccagtttaacatttgtttcattcgatgactttttatcatttcagattgatcgtactctaattgaaaaccattaacgaccatgtttttccacattaacgttaattgcatcgtaatgtcaatctcatagagcgatgtcttttgttgaatcaattgatttatttttttaacagcatctagaatattttttgcccactgttgatttccatccaaaaataaatagggcaaattggttgaaaacatatagggctgaacatagcttgaatacagttcctgagataaaacgaaatggggtgacacatttaaacaaatatacgtacaatccgagccttccttttcttctgccatgtgcaggcagccgctattgataaataatccatccccttcgtgaacctctattttttcttcatttatttgaaagagagctattccttttagtatcaaaacaaattggatttcatcatgccaatgaagcggaatatagccatttatattttgattgatccttgtcttgtaacaggcaactggtaattctaccgttcggtgctctgttaattcttttaaattttgatcgatcacaaaattcttcattctgacttctcacctcaatatatttatattttttcattcgatttgagtattttttatcctattttgcatttattataacactattattatatttattagtgaggagtcatgtatgaatacttccaatagaagaatgggattgttctatgttataacaggggcgacatgttggggaattggaggcacagtagccaaaaaactttttcaagaatatcaaatcgatgtcaattggcttgtaacgacacgcttgcttacggctggaatgttacttttaatgctgcaactgttcagaaaggaccggtctcaggttattgaggtttggaaaaacaaagcgtcggctggccagcttctaatttttggcctattgggaatgcttgctgtgcagtacacatatatggcatccattcaacatgggaatgctgccgttgctacattattgcaatatttatccccagtaatcgtcattatctacacgcttttgcgaaaacaaacggttcttaccaaacaagatatcattactgttgtacttgctttagtgggttgcttttttttgttaacaaatggttcaatatctcaactttcagtgccggcagctgcagtagtatggggagttttatcaggattcgcggcagctttttatactttatatgccgttggtttattaaataaatttgattctcttgtcgttgtaggttgggctatgattattggcggttttgcattgggttttatccatccgccatggcaactggattttcaacgattaactgctgaggcgtatgcatatattttatttgtgatattatttggaacaatgattgcgttctggttcttcataaaaagcttggaaagcctttctcccaaagaaacaagcctattaggcagtttagaacctctatcagctgttgtaacaactgtcgtttggttaaaagcgccatttggttcttttcaatggattggtgctatttgtattatagggataactttaatattggctttacataaagagccttctatggagagtgaaaaatcgatattaaagattaggaatcatgcaaatcgggatatataggggctttttttgcttacatgaccggtccgacaatgaaaaacactggtggagtttgagccctctcggcaatatcaaaaagaccaagggttttgacgcccttggtattttttcttcaagaaccttcaatttttcttttttgtaattggtatccaaatttcacttttaaaagatggtgatgttacatccttatgctcgttccacaatatttctggaccttctatttgttcgtaatttgacgatggaaaccattcggaataaatacgtccccatacttcttgcagtgtatccggaaatggcccgattgattcgaatacagcccacgttgaggcaggaacttcaagccgtgagaaattatctggacactgtttcgttgtggctgcgccaatatagtgatcaagctctcctttttcctctgcccgaccttcagaaaaattggtggatgcactaatgagtcctgatggtgctacattagaaagctcttttagtttatttattgctttttcatctaaactttcccacatagatgcaatttccggattaattcctttgaaaataatatgaactctttttttaatgccaacgatgcgaaatgcctctttttcttcaatacggtagttcatttcatttcctcctttaattgttagctggaaggtcattcgtggataagctttaagggaatggccattaagtctggcttttgatgggtttatgccatgtaaattttggaatgcccgtgcaaaagaatcaggtgagttataaccgtactttattgcaatatcaatcacttttacattgctgtctttcagttcaaaagctgcaagagtaagacgtctgcgacgaatatattccgataatgaaatacctgcaaggaaggaaaacatccttttaaaatgatattcagagcagaaagcaagctttgctgcctcttgaaaatcaatatcattagtgaggttttcttcaatatactttaacgccctattcatacttttaagcaaatccatttatttggcctcctttaaccaaagaataacaggagtgaaatgtatatatccgacattctgtgcacagttttgcaggatgacttagatgaaataaagtaagtgattcacttgtatttgtacaggttttattgaagcatgctgttcataaaaaggcatcaataaaagaaagttataattgtcttataaacggcacattcatataattgagtgaaaaaggatgcgtatcatgcctatcaattcttttgaaaactatccgatgagctggaagccatcgattgataaagctgaaaagcctatttataaagcacttgcagggcaattggaacaggatattttaaacggagttttattacctggaacaaaacttcctccgcagcgagaattggctgattatttagatttaaatgtgagtacgatttccaaagcatttaaagtgtgtgagttaaaggggctgctgagtgcgactgtagggagcggcacatttgtatcgtatgatgcgttgtcgaatgcgtatttacttgaggatacaaagccgacacatttaattgaaatgggagcaatacttccagatcacgcttcatatgagcccttgttacaccaactgaaaaacatgattcaggaggaggattatgaaaaatggtttagctacggccgggcaggcgaaagcctttggcaaaaagatgcagctgtaaagctcatccaaagaggcggatttgaaacatccgttgatcacattttatttgcaaatggagggcaaaatgcgattgctgcgacattggcgagtctttgtaagcctggagaccgcatcggtgttgaccatcatacgtaccctggattaaaaactgttgcatcattgcttagtgtgcaaatcgtaccgataaaatcagaaaacgatgaaatgagtccggagtcacttgaatatgcgtgtaaaaacgaaaatattaaaggtttgtatttaatcccggattatcataatccgacgacttcctttatgtctgttgagaatcgaagaatggttgcagacattgcaaagaaatataatctatttgttattgaggatgcatcgtaccatcttctcaacaaaaatccgcttccggcactcgcctcattcgcaccgcaacaggttattcatattgcaagtttatcaaaatcgttagcgccaggcctgcgtttggcttatgtagcagtgccgagacaatataaggagccaatatcaaaggcgctttataatttaaatataaccgtttccccgctattagctgaacttactgctcgcacgattgtatcaaatcaatttgaagtcttaattgagagtcatcgtgaacaaaccattcgcagaaatcaactcgtaaaccgatatgttgcgggatatacatgtttaggtgttgaaacaggcatttttcgttggttgttgttaccgggtaaaatgtctggtgccgaatttgaagaattggctgctcgacatggcgtgcaagtgtatgcggctgaacgctttgtagtgggaaatagttgtcctgaaagggctgtaagggtttctgtctgtgcaccaaaaacacttgaagagcttgaacaaggattaatgatcctgagacgtttgctagacgatcttacctaatattgtttgccatacaattatgacattgtatggcttttttgtgcgtgttatgatgatccacatctagagggaggtttatacaaaattggcttttagaaaggaaggtcagatgatgttagacaaggacagcgtaaaagcaatagatgttcaaactgcttcattacaaagctacatcagttcaccagaaaaacaaaaatcgttatacaagcgtacactattcgttgtgagtatctcacaaatttttggcggtgcggggctggcggcaggagtgactgtcggtgcgcttattgcacagcaaatgcttggcactgatgcgtttgctggtctgccttctgcgttatttactttagggtcagcaggatctgcattaattgttggaagactttctcaacgttatggccgtcgaacaggtctttcggctggctttatgattggcggacttggagcaataggcgttattatggcagcaatcataaatagtattttcttgttatttatttcgttgcttatttacggtgcaggtacagccactaatttacaggcccgttatgctggtacagacttagcaaatcataagcagcgagcgactgctgttagtattacgatggtttttactacatttggcgcagtggcaggtccaagcttagtgaatgtgatgggggatttcgctctttctattggtgttccatcacttgctggccctttcattttagccgcagcagcatatattttagcaggtgtggtccttttcattatgcttcgtccagatccattagttatagcaagaacaatagaagcggcaaatgaagagcctggtgataaaggacatttggcggcaactgagcatacagaaaacaaaaaagggataatcgttggggcaacagttatggttcttacccaaatagtaatggtagctattatgacaatgacaccggttcatatgagacatcatgggcatgacttgggggcagtagggcttgttattggttttcatataggtgctatgtatctcccttcactggttacaggtgttcttgtagataggttgggacgtaccgcaatggctatttcctctggaacaacgttgcttttggcaggtgtaatagcagcatttgctccgggagattctatggttcttctcgtcattgctctttctttactcggattagggtggaattttggtttgataagcgggactgcccttattgtagattcaactgatagtgccacacgagctaaaacgcaggggacagtggatgttctgattgcgttgtcaggagctgctggcggagcattatctggaatgattgtggcagggtcaagttacctggcattatcatttactggagggatgttgtccttattactcattccagtggtggtatggtttaggggacgataaaggataggattgtttaatttacattaatttgttatattgttagataaagtctattgcgtcgtctaataatctaactaactatagttgctccattaaatctaaatcagcaattttggtataaagatttgtgaccaggattccttatagctgtgtcactcactgcatattctttaattgaatcacataaaatggttatcggatttgaaaaaggcaggattactcgctttaggtaaaggagtcatcacgttgttaaaaaggttttctcttgtttttgttacactaatgatgtctatcgttgttgttttagcggccgctaaagagtcgcctggagattatgtcatctcatttgatgaacctattatcttgatgatctcaattggaatcgttgtatttttatttatccctccattagtcatgtccttttttggcaatttggttgtaagaataatatctggtgtataccaatgttttatcgttttcacttttctggggctcattccaattggatttcttattcccaatggctttttgacaattctagtttctattgcaggaactttagtcagtatagctagtgttgccgtaaccttatgcattggcaagaataaaaaagatatataataattgaattgttattttttcagattgtcagtgaaatagtaaaacaagatgagaaggctttgtgggccttcttttttttgttgttgcatcatccccactttaagcttaatctattgaataataagagaaggaacctatagaagaataaaataaataacgagatgtcaaaaataaaactggacttcattattatcaattcacgtaaatgtaaaaagcttggaaagaggggaattctttcatgacaaatagcagaacgaatccgaaggttgatgaatttttaagtaaagcgaaaaagtggaaggaagaatttgagaagttgagaaccatcattcttgactgtgagctgactgaagattttaagtggatgcatccttgttacacatacaataataaaaatgtcgttttaatacatgggtttaaagaatattgtgcgcttctgtttcacaaaggcgccttattacaggataccgatggaattctcattcaacaaacggagaatgtacaggcggcgcgccagattcggtttacaaatgttcaggaaataaatgagctagaaaacattttgaaagcctatattcacgaagccattgaagttgaaaaagccggtttgaaagtggaagttaacaaaaatattgaattgaacattcctgaagaacttcaaaataaattcgatgaaatccctgcattgaaaattgcttttgaagctttgaccccgggacggcaaagagcgtacactctttatttttctcaagccaaacaatccaaaacccgagaatcgagagtcgaaaaatatgtgcaaaaaattctcgatggaaagggattaaaggattaggcacgccaaggttcaggctaaaggaatatcatcatagcgtaataagatcctttctatagaagaaaaacaagcatagtaagatgcttgtttttttcttaggacaacattcacttactgctgaaatgcttctaacattgtatgccactagacagcgttataaaatattaatgcaacacctagaaatagctcaatggtacggctcatcacatttagaatgcctaggagaactaatagaaccggaagatttttagcaagttactacactccaaactttgtttttgtattaatataccttattaaccattgtttttagtcaggtgcagacaaacgaatactgattaatgaatcatcatgatatcaatgagccgtttgattttttcatcgtcgcctgtatcaacgtacactgtttttctgttttttatgatactctcagtcacttccctcatgacgcctttttctatatcatcagcggaatcccagcgtaaaggcacattatatacatgaattgtgccatccccattgccatgataagtgactgatccatccactaaacgagaacctgccaactgggtcacattttctggatagctggcacttgtatcatcattaggattaattggctcgccagccgaaatatgtcgaacattcaattcatctatctcttgattaggtccaagttgaagccaaactctggcatattcaattttttccgaagagtatgctgccaatacattgtcttctttgcttttctcctctgctgaagaggtatcatttgcagcttttgttgcggattcttctgattctgttattggctccgcttcatccttgcgtattttggtgctgtcttcagtctcagtgtgtttttcgtcagtttgtacagcagaagcttgatttgaaggttgttgtgcttcttcatccttactgcccgtacatccagcaagcaaaatcatgagcagcagggcagtattgcaatagcatatcattctgcatttcttcattttttcattcctctccattaactcaggtcagcttcatatataagtttatgtatctaaatattaccatggaatagataggatgatgttgaaaactgtttaagaagaggaaacgatcttgaatagcatcgcgaaaacttaagaattcttaagaagttttgcccctttttcttcaggttttgaatgtaaagtgggatataaatgcaaaacaaatggagagattagatatgaaacgtctgttattcttatttcagtatatagtgaatccgagaactgttggtgcgatccttcctagttcaaggtatcttggagataaaatggtggatggaattgatttcaagaaggctgcatacattgtcgaatacggtccgggtacgggtgtattcacaaaaaaactgcttgaaaaaagaagacctgaaacgactattttattagtggagcaaaatgaagaattttatttactattgaaagagacatttaaagacgaaaagaatgtatttattgtaaatggatctgctgaaaatagcagccagtatgcaaagaattatggtatgccttatatagactatgtgatttctggccttccctttgcaagcttgccaaaaactgtttcagccaacattttattagataccgcaaagattttaaaaagagatggtgaattcattacttttcaatacactatgttgaaaaaaccgttttttgaacagttttttaccaaaatagatgtaaaaagagagcttagaaatgtaccgccggcttatgtctttagctgctcgatgccgcaaaatgatttggaggaattatatggagtcgaacgttcttattgttgatgatgacaaagacattagaaatctcatctctgtttatttagaaaatgaaggcctgtacactcaaaaggctaaagacgcaatcgaagctttaaacctgctggaacaaaaagaatttgacctgatgattttggatattatgatgcccaacatggatggtattgaagcatgtatgaagattaggcaagaacgaaatctgcctattatcatgctttctgcaaaatctgaggatatggataaaattcagggacttgccgctggtgccgatgattatttatcaaaaccgtttaacccattagaattaatcgctagggttaaatctcagttaagaagatataaaaaatacaatactgatacaagcagcacgaagaacatcattgaaattggtgacttgaccgtaaatacagatacacggcaagtatgggtgcggggccgggaagtcaggctgaccccaaaagaatttgatatactcgaacttctttgcatgaacaaaggaatggttctgagtgtggagaagatatatgaagcagtatggaaggaagacttttttaagtcggacaacactgtcatggtccacattacaaaaatcagagataaaatagaagaggattccaaacatcctatttacatcaaaactgtttggggaacgggatataaaatatgagaaagtttggaaataagctggttgcaaagcttcttggcgcgattgcaattagttttcttgtttcattgggtatgatggcactcattatattatcgaacgtctatctacaaaagatgaattatctcaaagagtttagcatccggagcagctattttatgatactgcttcagttttcggcagctattcttacttttattgcagttttttttatcatggcacggaaaaaaatattatatttgaagcttattactgagagtgttcatcatattgctaatgggaaattaggcttgaccattaggattgaaagtagggatgaattgacccagcttgcccaaaacattaatgatatgtccaaagagttagaaaaaaagtttgaacacgaaagacaattagaaaggtcgaaaagtgaactgatttcaaatgtatcccatgatttaagaacaccattaacatcaattatcggatatttggatttattaaaaaaagggcaatacgacagtaaagcgcaatttcaggaatatcttcaaacgattgattcgaaatcgcaaagactgaaatacctgattgatgagctgtttgagtatacgcatttatcgagcccggacgttaagttaacctgtaaaaaagctgatttgtcaggtttattggaacaaataataggagaatacattcctatttttgaaaaggaacgactaagtgttcaaaaatcaattgcagaagacaatgtacctgttgtaatggatatagaaaagatggttcgcgtttatgataatctctttatgaatgcgataaaatacagcaggaaaccatctgaattattcataagccttgagatcattggtgacaaagcacttttgaaaatttctaatcaagttgagggttttccggctgacaatatagacaaattgtttgaacggtttttcaggggtgataaggcaagaacagatcaacaaggaagcggccttgggctagccatttcaaaaagaattgttgagcttcataatggtaatatccatgcggattatagagagggctggatgagctttattgtcgaacacccattgtgtatataaaagcttatggaggaaagtttccataagcttttttctttagaataaaacttaagaaaccttaagaattttacggagagtttcttcattcttattgcttatcatgtaggtatggaaagtgaggagagtgtagaaattgaaaagtaaatttcttattatagctttgtggtttttagccatttatatagcaaaggaatatcatttactgtcactcgatatggatgatttacaggaatttatatcgttgaacacaaaatacgcaatgctgctgtttattgcgctctggatcattagacttctcttttttattccaggtgtgactctcatgtttttgggggagtatgctttgatccggttgtgagctttatattgtcgatggctggcatttttttgagcgaaaccttggtttacgttttttcaagaatgttttcaagcgggaacatgatgaaggatttagaacgtaaatatccagagttgaaaaaattattggagacttacaattataagtttttggcgctggggatgatttgtccaatagctccaacagatgtcgtttgttttttatcggcagctgtaggaatcaagtataccacttacattttaacggttatcgttacgaatatccctttattgatattttcgagtttcattgtgatcaattttagtgagtcattaatgggaactgtattggttgtcgcatcatttgttttggtttctattgtatccattaaaatgtggaacacccttaagcataaacggagcacatagaaatgccacgagactaaccatttatagcttataagcacctgtagagatttaagttctttcggtatccaatagtaccaagggttaacagcccttggtattattttctgctgcacatatataaaccctccattttcgcttgtagatccttttttatttttgtattttaggttgaatgatcaccagaagaaaaatgaacgcatgatctgaaaagctgttttgccgcaaaataaataacaccccgatgatcaacgataacaatcccgctactacgatatattgtgtgtctgattttgattactgtatataatcgttttttagtaaatgctctttcattttttgtatagccttcgcttcgtcagatccatttgcgtgtatatatattttggttccgggtttaattcctaaagccataatgtccatgatggcttttggcgcttgtttgaggttaacagttttcccttggtattcaagaaaaatatctgatgtaaaccgatgagctagtctgactaacagggtagccggtctcgcaaaccctgtttccttaatgatcgtaaattgtcttttaatcattcttcacctcattacattctgcctcttgacggatttatagttgggttgcagatcaaatttgaatttagagtacctttaggataagtgatctaatttcatcgaaataacactctttctttgtgtttacaaaataattctcaactaactaaaatggacaatgacttcattcgagaaaaaagcatgattcactatcagcttttgtttattattgtaaataaaaacatggtgtgtacaatggttacattcaggcgatttgttgattattcaacattccactctaaattgttgattatcttaagaaagtttggtgaaaagctatgtccaaagtggatagaagaataaccaaaagccaagaggctattaaaatagctctgattgagctgatgactgaaaaaagttttgatcatattacgattaaggaaatttctgaaagggcaaatgtaaaccggggaacaatctatcttcattacttagataaatttgatctattagaaaaaattatggaagagcatataaacaatatgggggatttttgtgagtcggcagctgaaatggactggattgaatcgactgtacactgcatggaataccttgagagtaattatttattcttttcgacgatgttagccagtgaaggcgctcgatattttcgcagtcagttccttaagtttaatatcgaagagttcaggaaagatgtagatgtaacgaaaggcaagaattacggccaaagtgaagatgtcattgttgaatttatagcaaatgcttacgtaggggtagtggaatggtggttaaaaaacgaaatgccttatccgcctcgtgtcatggcagaaaaagtgggggagttattagagcggattttataatggaggcaggaaatgggtgttgacttatttgtctaggcgggagattcaagtctcctcgatcgcatacaaaataccaagggccagcaacccttggtatttttataccttcatgcatttttgaagtttatgcttaaaggtctgccttactttgcaaatcgccgagctgctgcaacgcacatgataacggcgatattcactgctacgagtgcccagcccactttctcgtgcagaatcactgaggcaagcagcagcccaaaaaaaggctggagaagctggagctgcccaaccgccgcaattcctccttgggcaagacctcgataccagaacacaaagccgatcagcatgctgaataaggatacatatgcaagactgagcagtgcgggaacgccgatgtccgaccatgagtccggcgtaaaaaagaacgacaagggcagcataagaggaagcgacagaacgagtgcccatgagatcacctgccaattccccagacgccgtgaaagccttgccccttctgcataaccgagaccgcatacgacaatagaagccagcatgtacgcgtcgccaagcggggatgaacctcccccctgaatgagggcgaaacctgctactaacaagctgccaacggttgagaaaatccagaagacggggcgagggcgttcacccccgcgcagtacgccgaagaccgccgttgcaagcggaagaagtccaatgaagacaatggcgtgtgcggaagtgacatgctgaagcgctaaagctgtcagcaacgggaaaccaatcactacgccaaacgctaccactaataatgaaatgaggtctcttttggcaggatgctgctgccggaagatgagaaggagacctcccgccagtacaccagctatcgcagcgcggcaaacggtgagaaaaaacgggtcgaagtctgacacagccaaacgggtcgcaggcagcgagccgctgaaaatgagtacgcctataaaaccatttatccagccatttgttgttttgttcattataatcactccacatatctttcttgttcattgtctgtattttcttaacaaaaccagcagctaaggattacaatgactataaactggaattggccttttttaaacggccagttttcataaaaaaatgcataccagttaggagaacaacgtgcaaatggatatcacgccttttttgaatagaactctggatattccgctttatcagcagctttatcggtattttaaagaaaatatgcatcggggccgtattcaaaaaggaatgaagcttccttcaaaaagactcctggcgaatcagctttccatcagccaaacgactgtagaacgtgcctatgaacagctcgctgctgaaggttatattgtgagcaagccaagaagcgggtggtttgctgattatcatgattctgattttgcttatgatagaatgccaagcacaacacccattcaacaagaagcagaagaaaataaacaatggattgattttcattatggaaatgtagattcttcttacttccctttttccgcatggcgaaaaagcatggtcaatagcttagaccaatatggacacgagctttatcggccgggacatgttttaggagagtttgagctgagaacactcattgcagagtacctgtatcaatctcggggtgttcattgcggccctgaacaagtgattataggtgccgggaaccctattctgctgcaaatcttgtgccaagtttttgagccgaatatttctatagggtatgaggatcctggttatccaagagcacgcaagatttttgaagccaaccgcatgaatattgttcctataccagtcgatgctgaaggaatctgtatacagaagatcaaagaacagcagccaaaccttgtatatgtcacaccttcccatcaatttacgctgggaacaatcatgacgatcaacagaagaattcagctgctcaaatgggcggccgaacatcaatcctttatcatagaggatgattatgacggggaatttaggtacacaggacagccggttccttctcttcaagggcttgatcagcataaccgtgtcatttatatgggcactttttctaagtctcttttgccctcgctgcgtatcagctatatgattcttccttcacctcttttaaaaaaggggcatgaaatcacatccttatataagcaaacagtgtcctgccacagtcagctaaccctagctgaatttataaaaaatggagagtggcaaaaacacatcaacagaatgagaaaactttaccgcaaaaaaagagccattgtattagaggcagtgcaaagggaattaggagagcatgtcagaattcgcggagaaaactctgggcttcgtatcttacttgacgtttatttgccatttggcgaaaaagagttaattgagaaggcgaaaaaacatggagtaaaaatttatcctgtttctctttcttatcaacatcatcctcctgcaaaaacggtctcgctcgggtttgcaggggtttctgaatccgacataagagaaggcataaaaaaactgaaggctgcctggaagatatgagggagctttcagtttagcaaaaaggccaagtgacgactaagtgttgagagctgttcaatattatttaagtatatgatgagtgcctgcagtccaggccacgatacgtctgtttagcgaaaaacagaattttttatttgctcctcacagtgctaaaataaacaaaatagacaattgaaaaaatagaggtgtaagaatgaagttagatgagtttacaattggccaggtcttcaaaacgaaatcattaaaagtatcaaaagatgatattatgcggtttgcgggtgaatttgaccctcagtatatgcatgtagatgaagaaaaagcgaataaaggcagatttaatggaattatcgcttccggcatacaaacactggccatatcttttaaactttggattgaagaaggtttctatggagacgatattatagccggaacagagatgaatcatatgacattcataaaacctgtatatccggatgatgaattgtttacaattgttgaggttcttgataagcagccaaagagaaatgaattgggaatactcacagtattgctatctacttataatcaaaaagaagtaaaagtgtttgaaggtgagttatctgtattgatcaaacgataactcagaaagcccgcttttcgcgggctcgattgaagcagatgggggaaagatgttagcgagtttcctttgaaaaataagaggttaaaacatcataaacaataggcaaagaagtaaatccctcatcttctagaaaatgacctccgtgctgaacttcatataacgcagcatcaatttgttgtgccagatccttgctgaatgaaaaaggcacaatttggtcgtccttagaagcaatgacagcacggtgcttcgcggactcaatgattgtttgatgatcaaacgatccctgtgtaaattcatctaacatctttaaagtgggcaatgatttggcaaagccggaaacaagtatgattccgccaagctgttttcgtaattgaagatgttccaaaaatctcaaaatggcggggcaacctaagctgtgcgcaaccaaatacgtattttcatgtaaagtgtgctgatataaagagagtgtatccagccaatcctcaagtcttggctggagcggattaggcatgtttaaaatgtctgcttggaccccatctgcgagcagacgttttttcagccaagggaaccaatgatttgttgaggaggctctgtagccatgaatgatatagacttgttttgtcattatttcctcctaagaaatattttcattcagtataaaattcctctcattgggaaacaagtacgcacttttttgtaagtagctttacatatgaggccctccttgtgccattccccacttacacatctcatctatgaggggatacaaagatcgccctctgtcagataacgaatactctactttcagtggggtttgagaaacctcagaccgatgaataaggccgtcagtttgcaattccttaagctgtgcgcttaacattttatgggtgatgaagggcatagcccttttcagctcgccgtatctcatcgttttttcactaccctaactcatagagaattctcattttccatttgccccctataagagataaggtgtattcaaatggggcttgtttactgcggcacaggctattcattgtaatcaaacctccttttttaagtatcatatcagaataaattaggattttcggtgttgaagtttgagggcgattcacgatctgaagtgaaaggggccgcttgctcaacaggcggcacggtacatgaatgttctaagtcaaagagggttaccttactgttagttactttatttaaaaaaacgcatgtttttagctgaaaatatctattatggtatatttaaatataaagaaatatttgagaaatgaggaatggtatgaatacacccaaaaaacataagaaatttaaagcgaaaatgattctccaaatcatcatggttatcattggaggaatcatagcggcatatggactagaaacagtgctcattccaaacagtgtatctgatggaggggtgacgggtcttagcatcgttggttcacagctattcaacttgccgctggggattttgattgcagtgatcaacattccatttgtctggttaggatataagcaaattgggaaaagctttgcattattatcaattatcggaatcgtatcgcttgccgcggggacaagctttttccaccacacacccgccatcatagaaggagataccctgttaattaccgttgtcggcgggattatccttggattcggaatggggctggcgctgcgtaatggcggcgcattagatggaattgacatgcttgctgtgctgctatcccgaaaactgccattcggaacgagcgatctcattctattcttaaacctatttgtgtttatctttgtttccacagtatttggcttacaaggggcattgctttcagtcattgcttactacattgcatccaaagtgattcatgttgtggaggaaggcttaagcggctctaaaacctttcaaattattacaacccaacctgaattaatggtagagacaatacgtgatcaattaggccgaagcgccacatataaagaagcttacgggggtttttcccacgagaaatttaaagaaatcacatgtgtcatcaaccgtttagaagaaaccaaactaaaggaaattattaatgatattgataaatccgcctttgtcaccgtatatgacgtagctgaagtgaagggcagcaattttagaaatcttaatcatcactaaaaaatagaatgacctttttaaccgtaactgacatgccgcgggtaatttaatcaaaaacacttttttgagggcttgtgggtgtcaccagtgaaggtctgaatcataaaaataccaagggaatcaaaacccttggtattttttctggttattagattttatcttcagctttacgtgctgcttcgagcttatcaatcctgtctttatatttttctccccagtccttcatgtgcaggataacaggttctaatgttcttccaaactcagttaaagagtattcgacttttggagggacctgtttataaacctcgcggtgaatcacgccatcccgttccaattctcttaattgcagcgtgagcatacgctgggtaattttggggtatagttttcgaaactcattaaacctttttttaccgtcaatgagatgataaagaagaatgcctttccacttacctccgatgatatctaatgttgtctccaccggacatccttcaaagtcatcagaagaataatcaatgccgagtttacgatttctcaagctgttcactcctaatagtatactttttgatactatatacattcaatgtgcgtactttttatatattaatatacatcatataatgatgtcacatctaaggaatgaaaggaatggatcatatgaaaacactcgtactcgttgtacatccgaatatagaatcctctcgtatcaataaaaagtggaaagaagccgttttaagtgaaccagatgtaactgtccatgatctttatgaaaaatatcgcgatcaaccaattgatgtggaatttgaacaacagcagctcctggcccatgaccgtatcgtttttcagtttccattatactggtacagcagcccaccgcttttaaaacagtggtttgatgaagtgtttacgtttggctgggctcatggtcccggcggaaataaattgaaggggaaagagtgggtaactgccatgtccatcggttcacctgaacactcttatcaagccggcggatataacttgttttcgataagcgagctgacaaaaccgttccaagcatctgcccatttagtaggcatgacctatctgccttcctttgccgaatatcgcgccaatacaatcagtgaccaagaaattgccgaaagtgcgaatcggtatgtaaagcatattacaaatatagaattaaacccgaaggttcgcctgcaaagatatttgaaacagctggagggtgtcgatttaacataaagattgattttggaaaatcctgtactcaccaagcaggattttttcttgttcagcagagggattttaacatatagcgaaaaaagaagaagccaccaaaaataagctatttgcttggtcctgactgcttatttttggtgatatacttatttctctgtgatgaaataaagcaaagcgatgaccggaaaagcgattccaatccataatgctgtactccatccccctgaggcatatgcccatcctccaattgatgaccctatcgcaccgcctagaaagaagatcgccatgaataatccgtttaatcgactgcgaatttcaggcgccaacgaaaaaatagcacgttgactgagcacaaggtttgcagatacacccatatctaacagaatagctgcggccactagaactgttataccgacgggggagctgctctgaatcatgaggggtaataataaagagacaacgacaacaacgagagcgattccagtggcaagcctggttaagcctcgatcagccaggcggccgcctattggtgcagcgactgcacccgcaatgcccaccaatgcgtagagtgctattgccttctgagaaaaatgaaaatcaggaccggccaataataaaggaacggtagtccagaacaagctgaaagctccaaatacaaacgcatgatagatggcacggcggcgtaagattggagtcgtgcgcagcagcttccacattgaaccgagtaaggcagtatagtttgtatttgctgttggttttctggcaggaagcacttttgataatacgatggccaggataacacttaccacggcggacaaagcgaatattgcattccacccccagatatcagcgactagactagatatcggacgggaaagcataatccgagtaataagccgctcatgacattgccaacaacccggccgcgtgcagcgtctgatgcaaggtatgatgcaaatggaacaagcacttgggctgcgattgatcccaatccgacgaaaaacgcagctgctaaaaacagtgttccatgcttcacaaatgctgttagtgtcaaagccgctgcgcttagaaggagcgatacaacaataagttttttgttttcgataatatctcctaaagggacaaggaatagtaagccggcaacgtatccgatttgggtgagtgtgacaatcaatccagcaccgcttggagaaagtccaattgccttactaattaatccgaccaagggttgtgcatagtaaagattagcaacaatgataccgcatgcagttgcgagaagaagggttaaactgggtgaaatcctctgacctgcttgtttgtttccattagccatatgaatgaactcctttttaagtggttttttgagtgtaatcatgacttctcacaagtgattttataaactgaacgttcagtttcgtcgattaataaaaataatatactaaacgttcagttttgtaaatggatttctgttttctttttttattcaatttaagtatactgaacgtatagtttatattgcgggaaggaatgatttatgtgcagagtaaacgagggcggccgcgtgatgaaggaacgcataaggcgattctctctgcagcctatgacctattgctggaaaaaggcttcgatgcggtgacagtcgataaaattgccgagcgtgcgaaagtgagtaaagcaacgatttataaatggtggtctaacaaggctgccgttatcatggacagctttctttcgaccgcgacggacaggctgcctgtgcctgatacagggtcgtcagtacaagatatagtaacccacgccacgaatttagctaggtttttgacaagccgggaaggaaccgttattaaggaattaataggtgcagggcagttggatgaaaaattggcagaagaatatcgcacgcgatttttccagcctcgccgcctccaagcgaaaggccttctagaaaagggaattcagaaaggtgaattgagagagaatcttgatattgaagtaagcatagatctcatttacggaccaattttctatcgtctgcttataacaggggatgaggtgaatgattcctatgtgcatgatttggtgatgaacgcgtttaagggagttcaagctacctctgctacagagagtatgtagctgataagaactgcaaaagctgcggattatatgacaaattggttccatcgtacgtgaaatataagatttttgttgctgagcggaatcgagggaaaagttctcttatcggatgtcgaaaaagaagtcattcaatcgtgaatacataacatcatattattacattccttttcatcgattggaacaagggttctatacttcaatggaatatcgcaaagttggagtatttaaacaacaggggaaaatcgatggccattatgtaggtgtcatggcaatcgaaaaaatacttgcaatgtaaacaggcctctaaagagacctgttttttaatatccagatgattgtctagtttcagcttgggctctatgactactcccataactgaaatagtctaatatttataccggaatatttgatgttccaaatataagggattgtttatataaataaaagtttatataatgacgggggcgctaaggaaacgcggggagcgactcaggttttgttcgaagttttgatccttaagatatacggagcgctacatatggaaacgtaaaggggaatgtagaatcatttggcgtgtatataatgatttgcttatatattgatttgggaaggaggagctcatatgacgattgatgttgcggcgatgactcgttgtttgaaaacgcttagtgatcaaactaggcttataatgatgagattatttcttgaaaaagaatattgtgtctgtcaattggttgatatgttcgaaatgagccagcccgccataagccagcatttgcggaaattaaaaaacgcaggttttgtgaatgaggacagaagaggccaatggcgttattattcaataaatggttcctgtcctgagtttgatacattgcaattgatcttacatcaaattgatcaggaggatgaattgttaaaccatatcaaacaaaagaaaactcaagcgtgttgccagtaaggaggcattagattgacatcaatgattttggcagtattcatctttttattaactctagtattggtcatatggcagccgaaaaatttatctatagggtggtcagcctgtggaggcgcagttttagctctaatagcaggtgttgtcaattttcatgatgtgttaactgtgacagggattgtttggaatgcgaccttggcttttgtggccatcatactgatatcgttaattcttgataatatcggtttctttgaatgggcagcgcttcatatggctaaggctgcaaaaggaaacggtgtgcggatgttcgtttatgtatctctattaggagctatcgtcgccgcgttatttgcaaatgacggtgcagctcttatattgacaccaatcgtattagcgatggtcagagcattacattttaatgaaaaattagtttttccttttatcattgccagcggatttattgcggataccacttcgcttcctttagtagtgagcaatttggtcaacattgtttcagcggactattttcatattacgtttattgattatgcatccagaatggttgtgccgtacttgttttcgctgctggcgagcatcattgtactttaccttttctttagaaaaagcataccaagacgctatgatctgactgaggttaaaaaacctgttgaagcaattaaagatcaaaacatgttcagactgtcatggtatatcttagggctgctgttaattggatattttgcaagtgaatttttttctatccctgtatcagtggtagcgggcagcattgcgatcattttcttaatcgctgcgcaaaagagtccggccgtccatacaaagaaagtggtgaaagaggcaccgtgggctatcgtattcttttcaattggcatgtacgttgttgtgtatggtgtccgaaatgccggattaacggatgtcctttcagatgtgattcaagccgcagctgatcaaggattgtttgctgggacaattggaatgggctttattgcggcgattctttcttccgttatgaataacttgccgactgttatgattgacgcattggctattgccggtacagatacacatgggatgatgagagaagcgcttatttatgcaaatgtgatcggttcagatttagggcctaaaataacgccgattggttccttggcgacattattatggcttcatgttctttctcacaaaggtatgaagatttcctggggcacgtattttaaaacaggaattatcctcacgatacccactttattgatcacacttgtcggcctgtatatttggctgctgataatccattcttgtttctaaaaggacaaggtcactatatcaaggaaaacaatgcactggtaactcttgacgcagccaaatggctgaagggtgggggagaaaataccttggggctaagtggaatgtgtacagcgcaggaatcgaagctcatggatgacatcgagtgctgttaaagcaatgaaagaagcagggattgatatttcaaatcaaacatcggataaatttgatgatccggcaaaagcacacggaacagaagaagtgtttccaaagggtccgtgatgaaattggtgaccgtttaaaacagtttgctgtaactggagaataaagaatcgatatactcagcgttttcttgggttatataatgcaatgtgttgttcaacaggtgtctgcgggctgagtgcaaacacctgtttttgttttttatttgtctgagattcgtaacagggaagttatttagctggtgacagaggaaaattgattttgtgaacagaatcatgaaggagacggtgttttaaaggagttgtctgttttgcaggaattaacaaaagaaaaatacagtagcttaaaaacaatgtttgatgacaaatattgtcccacatttgtctattcaatattagaccaaaccattccgggagctgtttatgcagatgatcaaacctttcctaaatcgttttttataggaactgaatcaggcatttattttattgcgggagaccaagggaatcgggattttcatgatttcattgcaggatattatgaagaacaagtgaaatcatcaaaacgatttaccttgttttcttccagtgatacatgggatagcgtactgaaacccatactgaaagatgacttaaaccaaatgagaagagctgcattttcttatcaaccaaaatctttcaaaaagactttgcaactgccaaaggggcttgtattgaaaagaattgacgaagacatcatttcacatagcacagcgtttaacagcgcgtattatgaggagtattggaattctgtctcacagtttgcttcaaaaggttttggatttgccgtattacatggcaatcacgtagtaagtgagtgtacctctatatttttagggcataatcgagcggaaatggatatctatacacttgaagaatatagaggactggggttagcttattgcgtagcaaataggtttatagcgttttgtatggaaaatgggattgttcctagctgggattgtgatatttgcaacaattcgtccattgcattagcagctaaactagggtttaagacggtaacggaatacactatttactactctggctaaccttaatgaaagaaccttaaaaggagataccaaccgatgttggtatcttttttgttttagagtttttttacccttttagcagaaaaatgggtgatgaaaatcttattcattttatttacttttaggtaggtaaaacataccccgccaactgtaaccactccgcctagcagagagagcagtgtgggtatctcgccgatccagagccaagatatgatcaaggctaaagccggtgtaacataaagtgaaagggttgcttctgaagcaccgacgagtgaagtgacatatgctagtgcgaagtaaggaataaccgtcggcaataatcctaagtaaacgatagacaaagttgcgcttattgaagcgttcatcatctcttcgcctaagcctggcagaaacacaagcataggtattgttccgccccaaatggtgaatgtaacgaatggaataaaaccatatttttttatatagcgggcttgaaaaacgaaataaatactctccgaaaatgctgccagcaggatgaccaagataccgctcattgaatatgtaaagtctcccgccccaaatgcaatcaataatacacccaataaactgatcatagagccaagccatttcgtaaatccaaaatgctctttataaaacaggcgggatagcatggctgagaagatcggtgccgtagtaacgagtaagcttgcaactccggcactaactgttttttcaccgatgttcagcaaaatgtgatagaatgcaaatcctaaaaaccctaaaagaaaaatggcaggaatgtctttcaagtcgggtaggcgcatctgagtcaaaacagcaaaaagcaataatgccatagagccgattaacaaacgaaataaagcaaggtgttctggcgtgtacccttcaagtcctgcgcgaattcccggaaaagcagatgcccataaaccaatcatgagactatgagatatcattatttgaactgttttctttcgcattcctctcactcctctttacaaaaaccaaccagttatttaatgtgtttctatactaataaagatttgatgatatggcttcaaccagttcaatagattttgacccaaccaatttattttaaggagaccgattctatgagctttccagaagaaaaaaagatgaaaaagctccctaagtacagacaaatcgttcattttattaaagagaaaataggaaatggagagtggccgattggaagcaagattccaagccagcgcacgcttgcaaaagattttcaggtaaatcggagcacagtgattacagcgttagaggaattgatggccgatgggctaatagaaggcacaatggggaaaggcacagttgttatcaacaacacatggacactgatggctaagaattctgctcccgattgggatcaatatgtcacctctggcattcagatgccaagccgaaaaatcgttcaagagataaatcaatcagaatcaaatacagaccttatacagctcagtaaaggtgaactttcagctgagatttttcctttggctgttatgaaagagatgatggggaaggtatctcaacacatggaggcattcggatatgaagaaccaaaaggttacttacctttgagggaggcattaagcaactatttaaaaaccattggaatcaacgtctcatcttcttccattctgattgtctcaggagcgttgcaagccttgcagctgatatcaatggggctgttacaaagaggatcaaccgtttatcttgatcagccctcctacctttattcattacacgtatttcaatcagctggtatgaagctgactggacttcctatggataatgaaggacttttgcctgaaaatgttcatttaacaagaggagagcggggaagggctatcttatatacaaatccatgttttcacaatccgactggtattcttatgtctaaaaagcgacgggaagaaatcctagcagtaagtgagaatacacagcttcctattattgaagatgacatttatcgtgagttatggatcgatgaaattccgccatatcctattaaaacaattgataaaaatggacacgtactgtacataggaagtttatcgaaaacattaagcccaggtttgaggattggatggatcgtcggaccggaaccggtgattgaacgtttatctgacattaaaatgcaaacagattacggatccagttcgctatcccagagagtagcggcagagtggtttacttccggccactaccagcagcatgtagaaaaggttaggcagcaattaaaggtgagaagagaattggccttgagtgctttagaaactcatttgaaagaagtggcgacatggaatatcccaaaaggagggttttttgtctggataaaaatattgccttccatatcaatgaaattactttatactaaagccttatcaaaagggattctgatcaatctcggcagtatctatgctcaggaaaaagggaattatattcgcttatcatatgcttatgcatctcttgaagaccttcaaaaggggatttatgagttgggtttaatgattaaagaattggcaagcaggtaacttttatatccttaaatggatgtttcactaaaaaagagatcaagcctaatgatcgcttgatctgataataacaagggttactagaatagaccaaatcatggttcggtcttaaaataatcatgtctctgaacgaaaagtctttccgacttctcttcctaaaccaaagtagtgtctgaaattatagataagcgggctccatttggaagggttgatatggttttcgtccagaatgatactttcctcggcatgaaaatgtagtgcctgcgtctctacaattgcgaatgacgattcatattctggaagccgaatgtgtttcacttcggcttcgatttggatagggcattctttaattcgtgttggtgatactgtttttgattgtaaaggcgttaaccctgctgcctcgtatttttcttttttatatgtaaatccgagctgcttctttaaaggcggtatactcttttttccgctataagatgaaattctttcaacgttttcccataaatccgggccaggcaagtttatgacacactctttgtgtctttccaaattgtcgatggcttttcctcccagtcctactccaaggattatataatgtccaagagcccaagaagaagacataggactaatattagtggttccatcctcattcaatgtggttagaagaaatgtcgaggtaccataatacatgatcttgggtttgatttccttaaatcgacgagtgtcttgttttttgatgtccaacgttttttcctccttgtcacgcttacatttatattgtaaaggattaacatttcaactatcatcgaaatatgaatgtaaggaggaaaatcatgaatcctaatattgcaaaaatctcttcgttgctatcagatccctcgcgttcttccattcttctcagtctgatggatggaaggatacaccctgcgggagagcttgcatatctcgctaacattaaacctcaaactgcaagttttcacctgaataaattgcttgaagcaaagctgattagcgtagagaagcatgggagacatcggtattacagattggctgactcagatgctgcaaatgtgatcgaacaattgcttcatattgcgcctaaagcaaaagtcacatctttaaaagagtcaaaagagaaaaaggacttgcatttcgcccgtacctgttatgatcatttggcaggttatgtgggcgtgcaaatggcacattcattagttgagcaggggatgttaaaaaaagttgatttaaactttgaggtgacttcagagggtgctttattcttttcaaagttaggcatcaatgaagagcaacaacggaataagaggagagcctttgcccgctgctgtttggattggagtgaacggcagcatcatattgcaggagcattaggaaacgccctattggtgcgcatgttagaagaagagtggatcgttcgtatgcctaaaacgagagcgattaggattacacaaagcgggaaaatcgcgtttgaaaagcacctaaacgtgaagatttaggatgttgaagcgaaggcacgatatccaggaggaggagtaagatttgttctaatcttactccttcttcttattttgaagcagctcgattccccattgcaatagagatgcggttccaactgtttatttgattaatgatcagaacaaggtcaacataatgtttttcatcataatgttcccgcacccgatgatatagctcatcaggaacccttttagatggaatgagcgtgatgtgttcagatagttcgagagccgctttctcttcaggtaagtaaaaatcacattcattccaagcatgtaaacagtaaattcgctgttcagtttcccccattttgcgggcatcggacgtatgcatatctatgcagaaggcacagccgttgatttgagagactctgattttgattagttctctcgtcgttcggttaattgaggattgtttcgtgtatttctccatatccatcatgattttcataccttcaggtgcaatctcatagtaggacactctttgactcataaggcaagactcctttccattgaatacctagattgtatcccggtattgatcattttaccaatgtgcggtttgaatgacagctgtttcagcgtcttttggaaagaagtttctttgaataaaaataagggtagccagcaatgatgagtggggctgctaatgcaagcagtatccatgagcctgattggctgtctctagtgactctaatgaatatataagtaccgatcagaaaatataataaagcacctagaaaccaatacatgttcaatcctctttttccttgctttttggttgcgcatttttgtctgtcatatggcttaatcgatcagggttctgattttttaataccttttcggtccggattccttttctctttaatgataaaattgtgagatcaatcgatttcaatgatgatcattccttcaatgaatagtaagttccttatgattttaaaggtaaatttgaaaagataaaacgtacatagaggcagaacgttcatgtacgtttgggcaatgatcacttattggaaactctaatgtttccctgcacctgatattgttgtgttccttctcttcctataaaatgattggatacatgtatgtttgcacgttgaaatatgggttcgattttcatgaatctctattcggtgaaacaggtaaaggaagtggataaggtttgcttataaggaatccttttaaagataaatattactcacatgataggcgggcattaaacatgcttgcactcagagtgccgggcctggcttttattctcatgatctatatagcctctatcgtgctgcaatttgtttctgggggctggtccattttattgctttatgcgtttaccatattaatcgccatttttgctttgcttcattggcactcatatcgctgggttaagaaaagagtgattctgtatttcgcggtacaaggtttgatcacctttgcacttgctaatctcatgactggcttctttatacttgtcattatcggcctttatgcatttttaattggacaaatcataggaatggcagacagaagaaggacttttctcattctttatctattgctgctgctggtcataaattcggcgtttcaccttcataaaggtgaagttttgcattttattgttattgctgggccaatcatgattgtcatcatcacttatgctgcaacattttttgcccaagtcgatgaaaaaataaaagctcaattgactcttgaaaggctggagctggctcatcagcaggtagaacagctgacgctgcagaacgaaagacagcggatggcccgagacttacacgatacgcttgctcaaggtcttgtcagtttaaatatgcagctggatgcgattcatgttcatctcgccaaaggcaacacagagagagcgaaggaaatcatacaacaatcgatgaaaagagtgaaaagcacattagctgatgcacgttcagctattgacgatctccgcagcaaatcagaagaaatcggtgttttaaaagaaagaattacctcgctaatggatcattttatagagtcgacaggcatggcttgtttattagattacagattgcatcaggtgctggatgtgcgtacagctgaaaactgttattacatcattggagaatgcatgacgaatgcggcaaagcatgctgaggcgaaaacaatctggatatccatttgggatgatgaaaagggaaggctccatttaacagttaaggataacggcaagggatttgatgttgaaaaaggaaagaaaaagagaggacattatgggcttcttggcatacaagaacgcgtcagggcaataaatggccaattcaatatcaagagtacaaaattgaaaggaacacaaattgagatcactgtaccaattcagggagagatgcaagatgaataaggttttaatcgttgatgaccatcttgtcgtgagggaaggtctgaagcttttaattgaaacgaatgatcaatacaccattataggagaggcggaaaatggaaaagtcgcagtccgtcttgcagatgaattagaaccggatatcattctgatggatttgtatatgccggagatgagcgggttagaggccattaaacaaataaaagaaaaacacgatatccccatcattattttgactacatataatgaagatcacttaatgatcgaagggattgaattaggagcgaaaggatatctgttaaaggatacgagttcagaaaccctttttcacacaatggatgcagcgatcagaggaaatgtgctgttgcagcctgatatcctcaaacgtctgcaagaaatccaatttgagcggatgaaaaagcagcgcaatgagacgcagctgacagaaaaggaagtcattgttctaaaagcaattgctaaaggtcttaaaagcaaagcgattgcctttgatttgggcgtctctgagcgaacagtaaagtctagattaacgtccatttacaataaattaggcgcgaattcaagaactgaggcagtaacgattgccatgcaaaaaggtattctgacaatagacaactaaactgcatatttgaaagttgcccaaacgtacatgcccgaatgtacgtttttttcatttcattgtcaactacaatgagaaagaatgtgatcaagcaatgcgttgaaaggagattatcatgtcaaaaatgttatatacattaggaggatgggttgctcgcaatcgcataaaagcaatatgtgcgtggatcgttgtgttagttgctgcgataggccttgcagtgaccttgaaaccaagtttttctgaggatatgtccatacctgacacaccttcggaaaaagcgatggatgtgattcaaaaagaatttcctcatggtcctgataaagggagcatacgggttattttcggtgctggtgatggggagaaacttactgggaagccagcaaaaaaagcaatagaagatacgttcaaagaaatcagtaaagatgattctgttgactcgattgcaagtccttttgtgacagggacaatcgcgaaagatggcacagttgcctatgctgatatcaagtataaatcatcagcagatgatataaagaattactctatcaaacacttaaaagacagtttgaaactggctgatgatgaaggattgcaaactgagctaagcggagatgtaccgggagccgagatggagataggcggtgtctctgaaattgtcggcattatcttggcttttgtcgttttagcccttacattcggttctttattaatagcaggtttgccgattttaactgcactgattggtttaggtgtaagtattggactggttttgattgggacacaagtatttgatattgcttccgtcagtctttcattagccggaatgattggccttgctgttggtattgattatgctttatttatttttacgaaacaccgccagtttttaggcgaaggcatacaaaagaatgaatcaattgcgagagcagtgggaacagcgggaagcgcagtcgtttttgcgggacttactgttatcgttgcactttgcggattaactgtcgttaacattccttttatgtctgcgatggggctgacagcagggcttagtgtactgatggctgttttggcttccatcacacttgtgcctgcggtcttatcgattgcagggaagcggatgattccgaaatcaaacaagaaaatagaaaaacaaagcactgaaacaaatgtctggggacgctttgtcaccaaaaatcctatcatgctaagtgtatgcagcattctgattttgatcgtcattagtatcccatctatgcatttggaactgggcttgcctgatgctgggatgaaagctaaggataatccggatcgccgggcatatgacttgcttgccgaaggctttggagaaggatttaatggccaattaacaatcgtagcggatgccacaaatgctacagaaaataaggcggaggctttcgcagatgcagtgaaagaaataaagggtttagaccatgtagcaagtgtcacccctgtaatgcctaataaagaagggaactttgccatcattacggtcgttccggaaacaggtccaaatgatgtcacaacgaaagatttggtacacgatgtacgcagtttgtcagataaaaacggagtagatttgcttgttactggatcgactgcagtgaatattgacatttcagatcgcctgaatgatgcgataccggtgtttgctgtacttattgttggctttgcgtttgtattgctgaccatcgttttccgttcgctgcttgtgccgcttgttgctgttgcaggtttcatgttgacgatgacagccactcttggaatctgtgtatttgtcttgcaagacgggaatctcatcgactttttcaaaatacctgaaagagggccgatactcgcgttcctgccgattttatctattgggattctgttcgggttagccatggattatcaagtattccttgtcagcagaatgcgtgaagaatatgtaaaaacaaacaatccagtacaagccattcaggctggattaaaacacagtggtcctgttgttacagcagccggcttgatcatgatcttcgtttttgcaggatttatctttgcaggcgaagcttctattaaagccaacggattagctctttcctttggtgtgctctttgatgcctttattgtaagaatgacactgattccaagtgtcatgaagctgatggggaatgcagcttggtatttgccgaaatggttagacaagatgattccgaatgtggatatagaagggcatcaactgacaaaggaaatacagccggaaatagatcatgaacaaaagaaacaaatcagtgtgtaatagaaaaagcagatctttaatgatctgctttttttgcatatggtagtatttagaagatgaagtcggcagttaaaaggagacacttatggcgccatcactcattttcgatatggatggaactttgtttcatattggcagaagctgcatcatactagcaggcatcccaggagaagtgacatgattttttgactttgcattcactacttgatgccaaggatcttgagaatccttcttgaaaataaaggattttacaactgatcatataagaaacctaaagaaacaagcacacaaaaccagctgcgggttttgtccaagaaaaatagagtccatgagagagactctattttttgaaatgcccggctagaagtatattgcaggtctttatgaatgcaaaacactatcttataagcccttaccgtgaaatgcctgtttctgcattgaaaaaacgcattacacgttcatttacgtaagcgggttgttccatcgataaaacatgtccggcatttttaatgacttccgcctcaatatcaggaacgaatgaagaggctcggtgcagggctgagtggggatcatagatgacttcatgttcaccaagtaataataggataggaactcttgctgaacgtaattcctcatcggtaaaaacatacggaaatccgtctgctttaggatttggatttcttgatccatcctgccacattacccctgcctgaaactgcttcacaaaaatcgggtgcagcacattctgatcattcatcatccaatttaagaatgtttcaactccatttgacgctgtaaggccaagagcgtatttgtagaaatcgtgatgaaatggcaaaaacgtttctgccggactcagtatagctgcgctttttactctctcaggcatacgtaaaaggaaattcatcgtatggagaccgccaagcgaaagtccgatcatgtgggacttttcgatccccagattgtcaaacacatcaagaagccaattggcgtaatccgttcttgtaccgcttaaattctcaggaatactcttgtttttatcacctatgatatcaactgcataagttctgtatttgctgctccaatcggcgatgttgggataccacatcgtcgagctgaataatgctccgtggagtaatacaagcggcggggcatcctctgggccgcttgcaatcacatgtgtttgaccaaaacgagtagatatatagaatgatttgcaacggaccggccaaagactaaggctttcattataagtttgataatagcggataccgttgtcacttaattcgggaatactagatgaatggtttgacatacaaatgcccctcccaacattgtttaaatgaatgtgccgtttcgtgatggggaatctgattttgatataacagactttatttacaatataatacagttgttgttagacgtcaaatccaagatgaaaaggaaataaaacgattggaacagattattgaaaatcaatataacagaatattaacctcctttgtggagccgcttcattaaaaccgcaatccaaatgcatgaatcacaaaaatcacaacaggagggatcaagagggaaggcagcaaattcaatgttttgaacttcttgattccaagaatgcttagacctgaactgaggatgagtatgcctcccacaattgtgatttcattaataaggtctgtattgattgcgctctccattactttagcaaataaatagatggagccttgccaggcaaataatacaatggctgcagccgctattccaaaaccaaaagttgaagcgagcacaatggaggtgatcccatctaacatcccgtttgtcaggaggtatgtataatctccatgcaaagcggcttcaacagggcccaatattgacagcgaacctatacaaaataataagaccgcagtagataagccctctgctaaattacttttagaaaatttgttcaccagcttgttgaatcgtaattctaaattgatgatctggcctagcaaacctccaatggctaaactcacgatgaatagaatggggtatttactatcaggcaaatgctgtgtaatggcgttgatccccagcgcgactgcagcgaatcccattgcctgcatcaaaatatcctggtattcatctttaatgccttttttgaatatccccccgattatgcttcctgcaatgatcatcactgtgttaaaaatcgttccaaacataagctttctcctccaaaaatcattcctgcataaaaaataaaccctctagttagtagagagtcaagggagatcaaaacatattcatgagattatttgatgggcagcaggatttcagtcacgtaattatctaggttattcgtaatgccataatcaatgagtgtgatttcgattgagtcccctgctacttcataatgatgttctttcatatatgccagtaattttttgtagtatggttcggcttctggatgtgaccctttaaacctaatttgcagatattctcttgaaggaaagatgatttctgaagaagttttttcattttcatcttcaagaatcataaatatactggaatatttgtcaaactgttttgctttcacatttgctgcagaaatggataaaccgatcttgcctatgaatatatcttcgtttacattcaggtgggttctcaattcagctaacgaatgttcgatatcatggccgagaacatattcatgctgcaagtaagccacacgcattgcgggaagtttgatttttgaaatttgatgtaacggcatgttaacggcatcttctatatgtgtgatgcgtcgggagatctttcgttcgatgcgttccaattctttctttttgcgatcaatttcagcctgctggctttttagtaaatgaagaagagtgtttgtattttgagagttataaaaatcaagaagcttattgattggcaggcctagggccctcaaatacttgatggtatcaagccgctcaaactgttgggtagaataatatctatagttcgtttgctcatctttatattccggtttcaaaaggccgatttcatcataataccgaagagcagagattttcacattgaataactttgacacttctccaatcgaaaaaaattccttcattctaacaacctttctgtgcctatgattgatatacacacattatatagtacggcgagttctaaaggtaaagtttgcatcataaagaaaaagctccttctaaaaaggagcttttcactcttcgaaataaggatttacatggatgagcacttcttctacatctgaaaactgtcttttgatttcatttcgaatttcgcgggcaatatcgtgtccctgcttaattgtcaaatcatgatccaaagataaacggacatcaagcaatttatagtggccatgttctcgcgcgcggattctatcaattcgttttacttgatcacattgaaaaataacagctttatattcctctatcagctcgggatcaacactcttttccatgagcacatcaacagacggcctgattaattccattgaaatcttaaaaatgaggtaagcaacgattgcactggcaatggcatcggcgtacaacagataggaccatccgcgggtgtttccgatgatagccaacaggacgccgataaaagcggcaagagaggcaacgatatcgcctttatgatcgtacgcaatcgctataatcgctttgctgttccatttttccccttgctttatagaataacgatataagatttccttagccacgtacgaaatcagagccgcaaacaatgcgctgtattggggaacgcttggccctttaacaaaggacagaatcgcttctatgaggatataaacggatacgatcactaagataattcctacaatcgcctcactaatgacttcagcttttccgtgaccaaaaggatggtcttgatcgggcggtttattggaaattccgatcactgccaagactgcaatcgaagcaacgacatctgccgcggaatgtattccgtctgcaaacacggcttcactatcgcctaccagcccaaaaaagacctttcctgccattaagatcagattggcgatcaatgcaatcaaagcaacttttctgcttatttgttctctttcacttgccattttttcctcctataaaactgcacaaaaaaataggagtgctctatatacgctctccgtatcctttcctgtgtaatcactttgtttatcataccaattcaatttcgagtgggtctatagcaacgttgtttcctgtttactaataaataaggtgacagaaaaaaagttggagctatgctaaaaaggtcatacagcaaacaaatgagttcttatgtaacaacagtgatgattcgctattaaaatgctgccgtcagtgaaaaatttccacctaattttcaaaaacctattgacatgagaagatctgtattttactattatctcatattcaagatattttaatttgagatatttggtcggaaagatcagcgatcaagcgcatctctaagtgttcaatccgttgtcatttcttttacacaatattcaatatggattttttataataaaatatctcgaattcgagataaaagggagtgtatcgtaatggctgaatttatacagttagtcaatgaaagacgatctgcaagcaattttctttcaggtcatccaatcacaaaagaagacctcaatgagatgtttgatttggttgcattggcgccatcggcttttaatttgcagcatacaaaatatgtggcggttcttgaccaggacgtaaaggaaaagctgaagcaggccgcaaatggacaatataaagtggttagctcttctgcggttctcttggtattaggggataagcaggcatatcaacaagcggctgatatctatgaaggtttaaaggtattggggatattaaataagcaagagtatgaccacatggtgcaagacaccgtttcgttttatgaaaacaggggagaacaatttaagagagatgaggcgataaggaatgcttcactttctgcgatgatgtttatgctgagtgctaaggaaaaaggctgggatacctgcccgatgatcggctttgatgcggaagccgtaaaacggattttgaacatagacgaccaatttgaggttgtcatgatgattacgattggaaaagaaaaaacagagagcagaagaccgcgcggctaccggaagcctgtgaatgagtttgttgagtatatgtaaaaggagcggataaaaatggctaaaaaaacgatgggaattcatcatattacagcgattgtcggtcaccctcaagagaacacagatttctacgcaggagtgcttgggcttcgtttggtcaagcaaactgtcaattttgatgacccaggtacgtatcatctttattttgggaatgaaggcgggaagccgggaacaatcattaccttctttccgtgggccggagcccgccaaggcgtcattggagacggtcaagttggcgtgacttcgtatgtcgtgccgaaaggggctatggcgttttgggaaaagagactagaaaagttcaacgttccctacaccaaaatcgagcgctttggggaaaaatatgtagaatttgatgatcctcatggactgcacttagaaatcgtggaaagagaagaaggagaggctaatacgtggactttcggagatgtaacgcccgatgttgccattaaaggttttgggggtgcaaccctattatcagcgcagcctgacaaaaccgctgaccttttagaaaacatcatggggctggagcgagtcggcaaagaaggagacttcgttcgttatcgttccgccggtgatatcggaaatgtgattgaccttaagttaacgcctattggccgcgggcaaatgggggccggaacggtgcatcacatcgcttggcgggctaacgatgatgaagatcagttagattggcaaagatatattgcttcgcacggatatggtgtaactcctgttcgggatagaaactactttaatgccatttacttcagggaacacggggaaatcctgtttgaaatcgcaactgatcccccaggctttgcacatgatgaaacacaggaaacaatgggcgaaaaactgatgctgcctgtgcaatatgaaccgcatcgcacacaaattgaacaagggctgctgccgtttgaagtaagagagttagattgatttgacacataaaaaataaagaaacatatattcaattgatgattgctggataccgtcagcaaagaattagataaaatcaaagatgaggagagatacaaatggaagatgcaggactgttgcttattcgtataatgattggtgtggtgtttttgttttatggcacacaaaaattattcggctggtttggcggatacgggattaaaggaaccggacaatggttcgaatcaattggggtgaaaccaggaaacgttgcggccgctctatcaggtcttggggagttagtaagcggaattctatttattttaggcgtattcctcccgcttggagctgctatcataacgatcatcatgttaggtgctatcgtaaaagtccatggagcgaaaggttttgcgaatggcgccggaggttttgaatataacctggtgctcattgcagtttccataggggttgcactcatcggttcaggagcttacgctttgcatttttaatacgaaagtatgtaagaacagttgcagcttgtcggtaactgttcttttattttgacattttcggcaagcttgcaggtactctgcaaagcaaaaaagcggatataataaatataaatctgtatagtgaatgatacgtattgatgagcttggtcatgaaaaacagacctatttgaaggagtaaatggatgaaagagatgacagaattacattcattagtttttatagaaaactttatcaaacagcacaaattcagttttatttatatatcaaggcctggctgttcagtatgtcacgcagttctgccccagctcagaatagtattggatcagtttccaaacatcaaattggggcatatcaatgctgacgatgtagcagaggtcgccggcagattttcagttttcaccgttcctgtgcttcttttgttcattgatgggactgagtttctaagagaagcccgttttgttcattttgaacagcttgaacaaaagctgaaaagggtttatcgattatatgaaggcgaataaagaaataaggcaaaaaaaagaactcaaatgagttctttttttttgcatcaatttattcttcactaggcgaagaagggttatcaacctgcccttgatcacttgtatcattatcacaacttgctgaaataataattgaatgagaaggagagtaatctcctaatgtgaaattgacaccgtaatttttgctgttcgcagtatggctgttttgcaagttatgtccgatatctgtattggcgttttgtgtcattccatttatcgtgagatttgagatgttgatttgagatcgcatgcttcaaaaactcctttcactcagaagtagccgtcatagaggacgctggcagtctatttacttctatgatattgcgtttttatatcattgcatcaacataatggtaaaaataatagcgagtgaatgagtctcttttgaagatgatcaacctatcagcagaaataaagccgcctgataaagaggcggcagatcgttatatgtcatctatgaatttgatgtatcgtttttcgtttgcctaaaggatagaatggtcgtttttaatgatgagtaggagcctatagcagcgtagccataaaaccagcccataaatacgccagaaaagaggctgtgtcgatggcttatgaaaacagaaatgacaaggcctgttattaaggcaactgacggtacaaaagttttggggattttcaataatattttgaggatttgggttatcaatatgatgattggaacagctatcacagcatcccaaaagttcgtgtgaataattggaaaagccatacggcacctcatgaagtgtttatttcttaatttttacgctaaaagcttggaaagcagctcttggatcgcatatgttacattttgggcttgattggcggagcttgtttggcttaaagtattggattcaaaaaccaaacctgtattactcccaccggaaccctctgttgttttagacacagagaacgggctgatggaaactgcaaatccgttattaaaaacgctgttcccggatatcgaatgaatataaactgggaatttcatcattcatctctcctctctgttatgactgtttatacaatatggtgtgtgagcagcagttgcttaaacaaaacggcaaaaactttcagtaagagacaaaaacctgcaaaatgccacaagcgccttttgttaatgcagctttttagggacgttttttttattttttttaccaacttcatcaaaaatattctgattgccagactgggcttgtccatccttatttatgaaatcggggtgaatgagttttttcagatccctgactgttaaaggcttggcgtcatcagttaattctattcctaattgcccgtttgcctctaatgtcgcaattttgacatcttgtatagccgtaacgccgtgaagccttagctgcatttcaagctggtcagctgtaagtctcatcttctttaagttttcgatatgaagctgtccgttttcaatgacgatttttgcttttccggttaacatcttttcaatggtgttcgatttcatttggatccattccataacgatgagtgtgcttgtgaaaattgccgctgcaattaatgttttgaagaggctgtactcgatgattggctgaacgataatagttccgatcgaaatcatgacaaccgtttgagttgacgtcatttgtgcgattgatttccttcctgaaattctcagcaaaatgaccccggctacaatgagaacaagagattcccaagtgaaattcatgctaccacctgaccaatgatgaattagatttgtcatgggattggcttttcttccggccaatcgcaatttaatatatccgaaaggcagtcggttcattctgtcctgaaccgaacaatatttttggtatagatggatatattaagccaaacaatgatagcaacaggagttttttggccgaaacaatctgggaagcggggagcgccataacatgattgaacttgaagttgtcattagaacggttgccagctttggcttgctgttaatcgcagaacgaattttaggcaaacagacaatctctcaaatgacgatttttgattttattgcggcgatcacactaggggctattgctgccggattagcttacaatacttcaataaaatcgcacaatatggccatttcgtttagtatttttgtgctaaccatttttctaatttcgtttctgtcgataaagaacaggaagctgaggaaattttttgccggagatccaacagtgctgattcaaaacgggaagatacttgaatcaaatatgaggaaaatgcgttacacacttgattatttaaatcagcaattacgggaaaaagaaatatttaatatcgaagaagttctttttgccattcttgaaacgaatggtcagctgactgtgttaagaaaaccgcaattccggcatgtgaccaaacaggatttaatgattgcggtaaaccaagaacaaaggcttccgatagaacttattatggacggagaaatcattgagaataatttaaagcagaatcgtttgacggaatcctggcttttggaagaattgcgaaaaagagacataaaggtgaaagagaccgtgtacgcagtgctgctgggtaatggggatatttatgtggatcaatataaagaccatatatcagtccctatggataaggaatgaaggaacaatcaatcttaaagctccttattgaacgcaatggtttcaacttgtcttgggtacgaaatatgcagaagcccgtttaacagctgaatctgtaacaaatgagtttcagcggcttcgggaagctgaatgattcgctcaatttctccgtaataccgttcacgcagcacttccatttcggctggaaaaacaggcgtgatcgttcctttgatcagcagctgggttttagacagtaaacggatcgttaattcttcctcatacacaccgggcatttccacaatgataaaattatattcctcatcttgataaaagtcgtaaacaaacgtagaagcttcggaatcaaaaaaatgttccggggctttatatttgagcacatttgtccaaaagtcactttgtttatattcattcgtaatctcaagccactttcgaattttttcgaaatccatatgagattctccttaaatttgatttgaaatcggcgcagaagggtttccgatttggtcttggtcactaacgtctgaatcaatatttccagtgttcaaaagtgaagacgtaggcgaaagatcccctaaggaaaagtttgctccaaaatatttgctgttcgcagtatggctgttgtgcacagtcggaccgacatctatatttccgttttgcgtgacgccgttgatcttaatatttgcgatattaatttgatatggcatagacgaaacccctttaatctaaaattggcggtggtgcaatcggaggagcattaacgttggatgtatcagagttgccgatagatgtctggtcatttacatcaggatcgtttaagaagttttccattacggattctgtaggtgatgtatcaccgaaagaagagttggtcccttgagatttttgattgttggtagggctgttataagcagcttcgcctattgtaattgaaccattgcccgaaatactgttgatcttcaaataatataggttgattactgtagacggcatcccatcacacccttccatctttctgtacagtacattatgcgccgctgcacccaattgttccttgcatttacgggcaaaactctatctggccctggagtgatgctcgttagaaaaaaagaataaagtttgtcacagcctgaatgtcaatctatttggcaaatacttatcagtgaatgaaaagccattgatataggaagcaatgaattgattcagttattcgaaatgcatgagaccctttaataaagaaagctggcaaacaggatcagtttgaaattattgacaatgaagcaaatgccatgaaataatactcgtgagtaacattacttgcgagtattatttttgggggtggtcctcgttgaaaagtaaaaaaggacgtaaaggggaagaaagccggaaacggttactcaaagctgccgctaatgaattttcgattcggggattccatgacgcgaaggtaagtgaaattgtgaaaaaagctgggttcacgcagccttcattttacctgtactttcaaagcaaagaagccatctttgccgagttaataaccgattttcactctcgggtcaaaaagctgacagagtcacttcttctggaaaacggattaaacacggaggatgtgtcaaaacgggtactgctagctgtagagactgtttttcagtttttggctgaggacaaggatttaaccaagatcggcttttttctcaacccggaagcaaaacaaatgaaaaaagacttggcgatggttttgaaagagaacttagaagcagaacagcggcttggctattttcactctgaactggatatggaaactgtcgctgagtgtttggtcggcatgattgaacatttaaccgattcatttttgttaaccggaatcaaagatccggcaagcctcgcagcagaggttgtgaatcttttgatatacgggatgcttccgaaagggaatgacgtaagatgatatctattattctgaaagtcagtttggcagtttttatgcttgcgggaggcatcataaaggtaagccgcgttccctttcaagttgagcattggcggcattatcaatatccattatggtttctgactgttactggcattcttgaaatagccggggcacttgctatgacagcgggaatttggaatcggtatgcagcgattggagcaggtgttctgtttgtcgttctcatggcgggagccattcatgcgcatatgtttcgagcaagacaatcggtcatcatggcgataccagcgatgatttgtttgattgtttctatcatgatcatcatggggagttacacgtaagcttttcactaatgtttaagaacaagcccatttgcaggaaacctcctgttcttatcgaataatagaaagtccaggaattaactgaagcagtaaaatagagatccatttctgcgttattcgtccggcatcagctgggctttttttataaaggaggaatacaggatggcattaactttggaagacatgactgaggaagagttcgaagcctttcgcgggatgtccgtgcaaaattttgcgaaacaaaacataacttcaggaacttggacggaaaaagaggcatttgagaaatcggagcagacatatgagaacatgattccgaatgggcgagacagcaacaatcattatttttggaacatcacaaatgaccaaggggaaagaatgggctggctctggctgtacgctgatccgtttcatccgcaaaaggaagcgtttatctattcctttggattgtatgaagcctttcgcggaaaaggacttgctcaattggcgcttcaaacgcttgatgaaagagcaagagagcttggtgcggaaaggctggctctacatgtatttgcacacaacgagacagccgtctatctttatcagaagatgggctatgccttgaccaatatacgtatgcggaaacagctatgctgaaaagtcgcttacgttacccaaacacaagatgcctatctggaagcagtggcagggtactataagtcatcattagaaacattaaggtcatgggaaggcttgaacatataaagaaaaaaggacaacagctgttgtccttttcaatgccgcttgaactttctccctcagtcttttttgtcttgatgatccagctcttttattcgtttcgtaagctcattgaaagcctgatcaagctccttataccctttatcatttggcgtcataaaactgagctttcccagcacttcttgtctttctgtctcaagctttaaccgaagctcctcccgctcatttctttctgaaggagcgtcgtttaactgcttttcgatgccgttgtttgagatgacgagtttactgtttgttgttttttcgagaaagtatcggtcatgtgaaaccgccagcaatgtgccgctgtattgtgacagtgtttcttccagctgttcgcgtgacggcaggtcgagatggtttgtcggctcatctaaaatcagcacgtctttttcctccagaatatatgccatcagcttgatctttacacgctcacccatactcatatgcttgatcggttcagtccattggtcggctgtaaaacctaagtgcctcatcagattttgaacgtgcccccttgctttgaatgtttcattctcaaataactcttccggtgtttgttctaaaggcaaatcaaacacctcctgcgttaaatagccgatgtttgcggacggcgacacccatacgcttccttctgctgtttcctgtccaagaatgatattcagcaatgtcgtttttccgctgccattggggcctatgatcgcaaccttttcgccgtgctgaattgtaaagtttgcgtttttaaagagagtcctttctccaaacgcttttgttacattctgaacttctaaaaaccgtttccctgttttgtgggttgtatcgattgaaaagcggactgtatattctggggtaacgggttccgcctttgctttttcaagctctttttcaagccgcttctgcttggattttatctgggcatccgtacgcttcgcttttacccggtgatattctttaaacccttcctttttcgtcgattgagcatgggctttttccgaccaagaagcgagctcattcatttgtgcttcaatccgttcaaccattttttgctgcttttcatattcacgctgctgggtgagtcttttcttctcccggaacttcatatacccggagtaattccctttgaattcaatcagcgtctgatcctcaagcgaccatatttttgttgcggcttcgtctaaaaaatatcgatcgtgagaaacgagaatcacagtgccgttataatgtttcagctgttggatgagaaattgcaagcttttttcatcaaggtggtttgtcggttcatctaacagcagcagatctgcatcctctgatagtcctttcgccagccgcgcttttagtttttcaccgccgcttaactgatgaaaatcacgaagaggcacatgccatttctccagtaacttcttttcggcaggtgtctgatccgcaaaggaatatgccgctgtttcctgttcaaccaaagccagttttatatcctttcgaaggatttgaccctgggaaggggctaagtcattgtgaatgaggtgcagcagcgtagatttcccagcgccgtttttgccgataatcccaatgatatctccttgctgaacactggcatttatatttttaaaaacagtcagatccttcacttcatagctaacgtttgttaatgttacgatctctttcatccatatccctcgctttaaagggagaataaaaaaatcctcccaaatgtgttggaaggattagccgtgcctgtgcatgatcaaataagctattttttataaatagcaggtcgtatatatagaaaatgggcagactaatcctattttttgatttgaaatattgatttcaaacgataaaaataagattagttaatcattgtccacccatcatcccttcttgttttgattacaaacactatagcataccttcaaattcaaaagcaaaggtcattttcatcaaaaaaactcctgctctcatttttgaggcaggagtttcgagtgttattgatgcttcgcttttctcactttataaatcacaatcagcaaaataaaccaaaccggtgtgacaaataaggaaacacgagtatcctgtgccagtgccagcacaaccagaacaaacgccaggaacgcaagaatcaggtaatttgtaaacggataaagcggaagcttaaacttgtttgttttcgctaattcaggtcttgttttgcggtatttcatatggcagatgaccgtaattccccaaatgtagataaagcatacggttgaaatacttgtgatcagggtgaatacgccttctggcatgatgtagtttaacgtaacaccgattaaaatcacgatagctgaaaagaataaagcatttcttggcactttacgctgagtcagtttcgccattgactcaggcgcattgtgatctttcgccagggaatagaccatacggcttgtactgaatacagcgctgttgcatgctgaagcagcggaagtcaatacaacaaagttgataatacttgcagccccgacgatgccaaccgcgacaaatacttgtacgaatgggctttcgctgggattgatgacatcccaaggatagatgctcataatcacgagaagagccccgatataaaaaagcaacacacggacaggaatattgttgatcgccttagggattactttttcaggattttctgtttcaccggctgtaagcccgacaagctcaatgccgacaaaagcaaacacaaccatctggaacgagaggataaacccgtgcatgccattcgggaacaggcctccgtggctccagagatttgtgaagctggacactcctgagcttgtggaaaagcctttgaaaatcatcacaaggccaatgacgattaacgccaaaatggcaatgactttaatcaaagcaaaccaaaattctaattctccaaaaagcttgactgtcgccaggttcataatcagtaaaataattagagcgattaagccaggcacccattgcggcacacccgggagccaatattgagtgtagagcccgactgctgtcagatcagccatcgcaatggaaatccagcagaaccaatatgtccagccggtgataaatgctgccatatcgcctaggtagtcttgtacaaaatccacaaaagagtgatagttcaagtttgataacagcagttcacccagcgatctcataattaaaaagcaaatgatccctgtgatcatataagcaaataaaatcgaaggtccggcaaaatgaatcgatttgcccgagccgagaaataagcctgtcccaatggctccgccgatggcgatgagctggatatgcctgtttttcaagcctctctgcaacgtttgctgatttatattgtctttcgtcatgtcgtctgtcactttatgtgttcctccattgaaaattgtttattgagtcagcaatctatttttaatgattattataacactaaaatttctatcttttttactaaaaaaggattgatgaaaagaattttaatgtgatttggactatttcccgaaaaaagcggctccatttagggagccgcttttttatgctttttcagtttttgtcataaacaggtagagcccgtaatctgtcggtgcggatgcgtagcctgcctgccgcagcattgctgtgatattgccacggtggtatgtcccgtggttgacaacgtggggaagcagttcggaaacagttgttttcatgattccgcttgagggattctgaatctggagtggcttattgagctgttctttttgctgtaaaaatagtatatagcgctcggataacctcagaaaaaggtcttccatttcctctatttctttagcctctgtctgttctttaagctgttcagctaaagccaacgcatcgctcaaggttttgccggaaaacacttcaatccagccgagatcagaaagataaacatgagacaatacatgggatattgacggaaacacgctttgaatttcttgatggtatacctcttttggaagctcttttaatcggttgaatatttgttgattggcccagacgttatattcatacaatttgaatgcaaaatctgacatgttaaaattccccctttcgtgtgtatagcttccattatacacgaacatgagttcttatgtagagtgctcaaaaataaaatttgttgacatatatagtttagaggaataaactaattgacattgaacataaagtttagcggggtaaactataatgaggaggggaagatattgaatgaacaaaagctatgtcaggcgataaacctgtttgtggaagtcctgcttgaagggacagaatttgtacatcgtgaaatcaatcaggatgtcttcaagcatatctcaagggaacaggcagacctgttgaaaattttaaaagtcaagggcccaacctctcccggcagcctggccatgtaccaaaatgtacataagagcgcgatctctaacagactgaaaaagctgctcgaaaagggattggttcaatgggacgactgtctggaaaaaagtgataggcgctctaagcttattaacattacacccagtggtgaacacatactagaagaattagattctgccatctttaacgcgctcaaaccgctgattgatgatatagatgaggaacacttacattccatcatcgagatattcaccattttaaaaagcaaatttaaaggaggagattctgccgaatgagagcaatcatcaaattcaagtgggcaattgcagccatagtattagcacttaccgtcgttttgagtttgttttctccgaacttaacggagctggccaatcaaaaggggcaggcccagcttcccgctgatgctgtttcagaaagggcaaacgccattttaaaacaagcgggagaagacaataattcgatcagtgttgtctttacattagacaacgctataaagaaagaaacagagaatcagctccggataatgattgataaaatcaaaaagatcgacggtgtagaagaggtaacatctcctctgtcagcggaaaaagaagtcaaagaccagttgatgtcgaaagacaagaaaaccgttctcatgcctatcacgattacaggttctgataaaaaggcggaaaaaattgcggacgagatttatcaaatcgttcctgatgacttgacggcatatattacgggagcttcccttatcaaccaggatttcgctcacagctcagaggaagggcttaagaaaacggaagtgatcacagtctgcctgatcatcggtttactgttgatcgtgttccgatctgttgtgacgccttttatcccgattgtggttgtcggtttttcttatctgatcagtcaatccatactgggcatccttgtatacaatgttgattttcctatctcgacgtttacgcaaaccttcttagtcgcgatcttgttcggcattggaacagattactgcatactgcttcttacacgattccgtgaagaattggcaaacgggcatgataaaaaagaagcggcgcttatcgcttaccgtacagggggaaaaaccttatttatcagcggttttgcggtattgatcggattttccgccttaggatttgcgaagtttgcgattttccaatccgcagtaggggtagcagtcggtgtgggaattttaatgattatcctctacacactgctgccattatttatggtgacgctgggtgaaaaattattctggccttctaagaaagtgctgtcacacagtgataacaaactatgggcgtttctcggcagacactccgttgcgcgtccgtttctgttcattgtcatcacggtggtgattacgcttccgttcatcttgacctatgatgaccagatttcattcgactcaactgcggaaatcagcagcgattataaatctataaaagctctcgaggccattaaggatggattcggggaaggaaaagcgttcccgatcaatgttgtcgtaaaaggagacaaagatcttacaacagctgatacaatcccctatctaggaaatatcagcaaagcgatcgagaaagttgatcatgttgactctgtgatgaccattacgcagccgactggtaaaaaaatcaaagatttatatattgataaccagctaggatcggtttcagacgggctggataagacggtaaaagggattgccgatgtccaaagcggattaacggatatagaaaacggactgaatcaaatggcagggcaaaccggctcggcctcaaatggagggtctggcggttcactgggcgatgcggcagatggcttgggcaaaatcaatcagcagctgcagctcgtgagcaaacagatttcccaaaccggcaataccgcacagaccgtgcagcagcttacggcaatcagcggacagcttggccagattcaaaccggtcttgaacaagcgaaccagcagctctcaggccagcaggcacaagccggaacgctgacagaaagcctgaagaagctgtccgaaggcgtgaaaagagcaaatcagggcctgacgaaagtctctgacggtattacagcttccagtgatatgttagaggatatgagcaaaagttcaactgtaagagatacaggcatattcattcctggtcaagtaatgaaggacaaagactttaagaagtcaattgaccagtattcctttgcagacggcaaaggtgttcaattaagtgtcgttctggattcaaatccgtactcagaacaagctattacgacaataaaccaaatcaaaaaagctgtcgcaaacgaagttgacggcactcctttggaggatgcacagatcgtatacggcggggtcacgagtatgaatgcggacttaaaggagctgtccacaacggacttctccagaacaatggtgattatgattataggcctgtttatcgtgttaaccattttgttccgctcaatgatcatgccgatttatatgatcgcgtcattgctgctgacgtactatacgtcgatatccataacagaattaatttttgtaaacggcttaggaaacgcgggtgtcagctgggcagtgccattcttcagctttgtcatcttgatcgcgttaggggtagattattcgatcttcttgctggatcgatttaaggaagaggtgcaccttggcattgagcaaggtgtcgtcaggtcaatgagcaaaatgggatctgtcattattacagctgccattatattggccggtacgttcgcggcgatgatgccttcaggtgttaatacactgatgcaggtggcaagtgttatcatcatcgggctcttgctttacggccttgtcattcttccgcttttcatcccggcaatcattgcgacctttggagaaggaaactggtggccgttcggcaggaagaaaggaaaagagtaatcgagagaagagtgatgaatggtcatcactcttttttcatgatctaaacgacgaacttcagacgtgttacccaaaaaaggtcagacgatcaaacggcggctgggtacttaaaaacaaagagcccggaaaacattcccgggctctttgttttatttccattctgcaattgtatcaatcggcagacggtaggaagcatagccttcgtctgctgcttttccgatagaaagtagcataaccggtacataacgttctttatctaatccgaaggtttccgcgatgttttctttatcgtatccgccgatcgggtttgtatcgtagccatgcgcgcgtgcagtcagcatcagctgcatggaaacaagacctccatcaatcaggatcgtttcacggttgacctgtgccggaagcttttcaaaatgtgcggtcagcgcggcgatttgtctgtctttgacctcctgcggcatgtaaccaagttccacggcttttgaatagatttcttctaagtagtctgcattgttcatgtctgcaaatacagcgatgacagcagatgatgttgtgacctgtgtttggttaaagcttgcaagcggtgcgagcttttcttttccttccgggctgtcaatgacaagaaaacgccatggctgcgcgttaacagaagatggggcagttgttgcttcctctaagatctctgtcatttcttctttgctgatttttactgccggatcatagttgcggatagaacggcggcctttcataatttccataaaatcgtttgttttgatcatgttgatacactcctcttaagcttcgatattatttatattgtttcgcatgcgcgccagcacatcaatgagcaggcggcgttcttctgcgcttacatttgcgagcatttccttcatgaaacgctccttttccttcttagaagactcaattcgctctcttccttggtctgttaaccgaacaagggtgatgcggttgtcctcaggcttgcgccgccttgataccatgcctttggcttccagctgtttcaggtgtctggtaacggctgcgctatcgatatttactttcttttgaaggtcgctttgactgatctcatctgcatgataaagcaatgtcagcaattccaaacgagattggctgatgcccgtgcatgcctcgaacttcacgccaatcaccttgttcacgccttgcagctgatataaaatctcggcttcctctgaacaaaatgacgccaaaacccatcccttctttcctgtcaaaactattaattgatatatcaatgattgacacgtcaattaatatacaacgattgatttcatcttgcaagccatttgcacttttgaacaacctcccagcgcataaaattcgctaggctagaacttagcaaaaaaagctggccgcttcttcagatgatgctggtcacgatgattccctgcatcattcccatttataggtgttcggaatatcactttgccgagcccgtgctcaagcggctttcacaggctgaaagttatgatacaatatacaaatgtttcacagcttcaatccatagttggagctgacatccattatataagggactaggttgaagggaaggtttgataacatgctgcacaatccaactggaaaagaacgcttggcactagcgtttctgctcggcatgcttgctatattgggcccgcttaatatagatatgtatttgccaagttttcctgaaatcgcgaaagatttatcagcaagtgcttcacttgttcagttaagtttaacagcctgtctggtcgggcttacgatcggccagctgattgtcgggccggtcagcgatgcgcagggaagacgaaaaccgctattaatctgtatttttttatttgcgttatcttctctgttttgtgcactgtcgcccaatataacaactttagtggctgcgcgttttttacaaggcttcactgcttctgcagggcttgtgctgtctcgcgcaatcgtccgcgatgtgtttaccggaagagagctttctaaatttttctcgctgttaatggtcattaccgcggtggcgccaatggttgcgcctatgacaggcggtgccattttgcttttgccgttcgcaacgtggcatacaatttttcacgtcttaatgatcatcggatttttactagttcttctgattgcattgaggttaaaagaaacgcttccgctggaaaaacggattccaagctcaatcggaacatccgtcaaaacgatgggcagcctgctgaaggatcgatcctttatggggtacgcgttaactgtcggatttattcacgggggaagctttgcatatgtgtctggtacgccttttgtataccaggatatctacggggtgtctccgcaggtatttagtattctttttggcattaacgggttggcgattatatcgggcagctttatcatcggacgctttggcggaatcattcatgaaaaaagcctgcttcgtatagcggtcattacggctatgattgcgacggctgtgctattaaccatgaccatgattcacggtcctcttgctacattagtcatatccattttcatttacatgattacgatcggcatggttctgaccagcacgtttaccctagccatggaaaagcaggggcaccgcgccggaagtgcaagtgcgctgcttggaatgcttccgctgctcctcggttcaatcgtgtcaccgcttgtaggcattaatgagacaacagccgttccgatgggagccatcatgtttgtgacagctgtcatcggctcactggcgttttttggattaacgaaagaacgagtagggcagaattcataaaaaaacctgacatgacgtcaggttttttgttttatttagaataacaacagcaggcctgcaatcgccggagtcaaaaagatggctgatttcaaaaccacctttggcatgaggttggtgaatttcgcgcctacataggccccgcacattgtcccgaccagaactttgacaagtaaaacgtaatcaacaaaaccttctgtaatatatccgatgcctccacctacagccagagggatgatcacaagcatcgtcgttccgacagaatggcgaatggacagattcagcataatcattaaaccgatttgaataaaaggtgccgacccgatgccgaatgtgccggaaagaacgccggctgcaattcctaagatgaccgctctcgtatacgttgaaagagtgctttgattcacttgagccttctcttttaaaataaataatctgattaaaatgagaattgctgataaaaataacattccagccgtcaaataatgaagcaaatcagccggaataaaagaagtcagcttggcgccgaaaaatgagccaaccgcagcaaagcctccgactattaagccgattttcatttgaatgttaccctcgcgatagtggctgtatgcccctgataagcttgtaaaagccatgccggcaagcgaagtgcctaaagccgtatgaatcgggatatggaaaagaagcgttaaaagggcaatgacaaagccggctccaccggcgccaataaagcctaaaataattcctagaagaaacataacaagaataatgagcatattttttcctccattgaaaagatgtaaaaaatgtaatcgtgcgctattctggcggaggtatggtgtcctattgacgaagaaaaacacgccgttttttcagttgccagtagtccgtcgaccgtcgttcagcaaacatatcgtacctcaaattctgggatctgacaaggcagtttgttgcttcccattaccatctgttatatgattttgatgaagaaaagcccttgaatatattcaaaagaggtattatatatggacgattttaaattagataagccgactccctactacctgcaattttataaccagctaaaaaaaatgatcttcaacgggacttttaagcctggggaacggataaacgaaacacagctggcgaaaagctttggcgtcagccgctctccgataagggaagccatgcgattgcttgagaaagatggtttgttaaaagcggatgaccgaaatgggttttcgatcacgtcgttaacggcaaaagatgtagatgagatttataaaatcagaattccgctggagcagctggcagtcgaattagtcatagacgaagcggacgaagaagagctgaccatactcgaaaaacagcttgaagaaacagagaaagccattcacaacggcacggaagatacggaaatcattcgtttaaaccaaaaatttcatgagctgctggttgatttcagccataacagacatttgaaaaatttgcttgagcatgtaaatgacctgattcatttttgcagaatccttaattataccggcgaccaccgtgcagaaacgatactgcgtgagcaccgcaggatatttgaagaagtgaaaaagaaaaacaaagaagcagccaaacagcatgtgctggctcatttcaatcatgactgtgagcatttgaagcatgtgcttgaagaaggtaaagagaattgatttgtatgatccggtaccaagggagagcagaacccttggtatttttttatgtattcaccacatatctaagaggccccgttaataagattttatgatggtttgactaacgaataatgggggttaaacatgtttatccatatcgtcgggcctggtgattctttgttttcgataggcagaagatacggtgcttctgttgatcaaatacggggtgtgaatggtttagatgaaacgaatatcgtgccggggcaggctctgcttatccctctttatgtatatacagtccagccgagagatacgcttaccgccattgcagctaaagcgtttgtgccattagagcgactgcgagcggccaatccgggcatcagcccaaatgctttacaagcgggagcaaaaataacgattccttcgatctcaaattacattgcggggacattgagtttttatgtgctccggaatcctgacctcgatcgggagctgatcaatgattatgcgccatactcgtcttcgatttcgattttcgaataccatattgcatcgaacggcgacattgcaaaccaattgaatgatgcggctgctattgagacaacttggcaaagacgggtcacgccgctggcaacaataacgaaccttacatcaggaggcttcagtacggagattgttcaccaagtgctaaacaatccgacagcgagaaccaatctggtcaacaacatttatgacttagtttccacaaggggatatggcggtgtcacaatcgattttgagcaggtgagcgccgcggatcgcgatcttttcactgggtttttacgccagctgagagatcgccttcaggcgggagggtatgtgctgacgatagctgttccggcaaaaacaagcgataatattccctggctgagaggctacgattacggggggataggagcggttgtcaattatatgtttatcatggcttatgattggcatcatgccggaagtgagccgggtccagtagcgccgattactgaaataaggagaaccattgagtttacgattgcgcaggtgccgagcagaaaaatcattatcggagtcccgctctacgggtacgactggatcatcccgtaccagccgggcacagttgcttcagcgatttcaaatcaaaacgcaatcgaaagagcgatgaggtaccaagctccgatacaatattcagccgaatatcaatcaccgtttttccggtacagtgatcagcaggggcggacgcatgaggtatggtttgaggatgtcagaagcatgagccggaagatgcagatcgtccgcgaatacagattgcaggctattggcgcttggcagttaacgctgggctttacaccgggcccatggcttctgcggaaattttttacgatcagaaaagtgtaaaaaaagacaccacaactggggtgtcttttttttgattaagtccagagcagcagaatagttcattcatttgtaccttgcataggttgtgttcccattttacgattagtagtagtctgatcaaacaaagagtcagaatacgatttgagagggagttgtctacatgaagacagtattgattttgaattttcctgcggaaggccatgtgaatcctaccttaggcattacaaaagcgttttccgataagggatatgatgtccattatatatccactgaaaaatataaaaaacgattagaagcagcgggagcaacggtccatcttcaccgggatctgctgcgaacaacacctattcatgtcggttcgcccaatggcattcttgatttcgtgaaaatccatatcaaaacgtcattggacattttacagattgtcaaagacttatctaagagcattcaatttgattttgtttattatgataaattcggcgcgggggaattggtaagggattacttagatattccaggagtctcttcatcggcgtctttcttgtttggcgaggagcacctgaaaatcctgccgctgcatccggagtctggagcgccgcttgaattggatcaagagtgtgaagatcttttggcaaaaatgaaagaaacgtacggtgttgccccgaaaaacctggttcaattcatgaacaataaaggggaattgaacgtagtgtatacaagccgttattttcagccagaaagtgatcgtttcggggatgaatgtctgtttatcgggccaagctttccaaagagagcggaaaaaacagatttcccgattgaacagctaaaagatgagagtgtcatttatatttcaatggggactgtactggatcatacagaggatttcttcaacctttgtattgatgcattttcaggctttaacggaaaagtcgtcatcgctgccggagaaaaagcggacctgaccaaattaaagcaggcgccggaaaactttatcattgctccgtatgtccctcagctggaagtgctggagcaatcggatgttttcattacacacggcggaatgaacagcgtaaacgaaggcattcatttcagcgtgccactggttgtcatgcctcatgacaaggatcagccgatggtggcgcagcgtctctctgaactccatgcaggctatgtcatctctaaagatgaagtcaatgcccaaatattaaaacaggccgtagatgaggttttgcgcaaccatcagtatacggcaggcattaaaaaaatcaatcaaagcttcaaggaatgtatggacatggaagaagtgatggagcgggttgatgagttgattcgccaaaaaaacaaataagaaaaagaactcccgtaccttgtacgggagttcttgatttaaaacttgattttgattttttgagcatcactgattttcttatggttatggtcaaagacgtcacttgtcgtgatttcgatccacttgatctcttttgttttcttctcagcatccgcggccttatcatgagcatggcggcttgatgcgttcacaataaagccgagatttccagacttttcggcgccgccttccaattcgccgtttaactcttcaagataaatatctttgttccaatcaaaggtttcgcccgtatttgttttcatcaatgcaatcggcgcaacatttactttttttgaagaggtgttcttgatatcaacgaaaaccttaacgaaatcaaactcttcatcgtgtgttaactcatgaaagtaatcaatcatgctgtagtccgggcgcaagtggatcagcttcatttcttttactgttaactccacgtcgccaatcttataggttttgttcacttgtttgatatcttttaagacagcttttcctttatcatctgaaaacgtttggccgaccttaagcaatgaccggtcatcagttacctgggaattaggctgataattatctgtgctgtccttctgggatgaagtgctttgcggctcagcttttactgttttctccccgcctgcatgctgtttttcagtactggcgtttgatgagcagcccgcaagcatgatagcaaaaacgaaaattgaaagaattcttctcatgatgattcctccattaaaaagagatcccgttacttcatacaagcaacgggacaccttgtaatcttttacttatcgttaatcttaatgttgtattgtaaagccttgaagacatttttggcgatttctgtattgtcgatttggccggcaaatgtctcactagacggaccgtatgcatagacgggaacatcttcaccggtatgtccgcctgttgtccatccagtgtgagagcgtttattaaagatgttctcgattgcgttatcgatatccagtacttccttcgattttgccgcttcttcaacagattgaatttcggcttttgttaaagccaatttcttttgatcgatatatgttttcaaagttttttcaacatccgcgccgtcagagatcttttctgccataaagtcaggtgtgcgctttgcggctttaatgggttcactgaaccagttgtagatgccgtccgcaccgatggaatatccgccggttgagtggtcagccgttgcgacaaccaatgtgtgcttgtcttttttagcgaaatcaatagccgccttataagcttgttcgaagtcttccatctcgctcatggcaccgacgatatcattgtcatggcccgcccagtcaatctggctgccttccaccatgaggaagaatccgtctttatccttgtttaattttttaatggctgtgtttgtcatatctttaagtgatggaatatccttcgtccggtcaatctttttaggcaggccgccgtcagcgaataggccgagaacttggctgtctttatttttcagcatgtccttgcgatcatccacgtagctgtaccccgcttttttgaattccttgatcaaattacggtccttacggtcaaaattgctctttcctccgcctaaaaggacatcaattttgtgcttgccgttgaccatctcatcaaaataatcatccgcaattgagttcatattttttcggctatggtcgtgtgaaccaaaagaggccggagtggcgtgtgtaatttctgaagtggccacaagtcctgttgcttttcctttttccttcgcagcttcaagcaccgttttggcttctgacccgtcgttatcaacggctatggcattattgtatgttttaattcccgcagacatagccgttgccgccgctgcagaatccgttacattttgttcaggatcatcgggataagttgtttgctggccgacaagatactgatcaaaagccgtaggctccacaacttttgtctttttattatcctttaagtatcgataagcggacgtataagacacacccataccatcaccaatcagaacaataacattcttaatttcgtcttggtttccctttttcttttcctgggcgctggcatcaggcacactgccgctggctaagctgctgaacgcaattgatgataaaaccgcgataggcagtaatttcttcgggaattttttcaactggataacctcctaaatatagatgaatctcaatgacaacccaattatatttttaaactgttaagctagtattaatcgattttaaagattggatttacaagaataatgaactgctatcaagagaaaggaaagagtgatagtactatagaaataaattggaggaatagatactggccgtggataggcggactgaaatctgctatagtcgcatagaagcaacccgcttacatctggaacaattttaagtattatgttggaaagaggtattgtgtaagcacatgtctgagcagttcatatggagtggcatcattttattttaggagggaacaacatggacgttttttctgagtatttagcgggaattgatgacccgttccaccgagaaagaacggaagaggtgttaacttggataaaaaataaatatccaaatttacatacagaaataaaatggaaccaaccgatgtttacggatcacggtacatttattattggctttagtgtttctaaaaagcatttagctgtcgctcctgaaaaagtaacgatagcgcacgtagaggatgatattgtgaaggctggatatgattacaccgagcagctgatacgtatcccttggaatggtccagttgattacacgctacttgagaaaatgattgagtttaatattctggacaaggcggaatgctccactttttggcgaaaatgaaggaaaaaggcataacatatgagctgtataaaatatgttacgccttttcatttgtctatttttcgttttgatcatctattgctgcttttcttcaaacaaggtcatttcattgagcgtaagctggctcgcagaataatgattaccttgtttccatttcacttcaatcgtaatatcatggccttcaagctcatgttcatctaaccgctctaaaaaagaaacggacttttcctttgcgcttccatcacgataagtgcctccagcataatcatgcatcgggatttccgtgtcagaactcagcagaatttcatcatccttttttacaatcagtgattccaaataagtgttgtctgtttcatgtggttcaccgatccaataaagttcgccgctgtattcattcggtgcatcttcattttttttgaaaacagcttcccaattctggtctttgctttctccctgccaattcggatactccaaacgaacatgatgaatcaggtgataggaaaaaaagatcaagcagagagcgattaataggaatgccgtgaaaatgagagggtatttataatgactggacataaaagactcctattcgtttaatcaattaccttcgaaaatagaatttcatcccgaatcaaaatgccgttttcagccacctcgggaatctccggcttgagtcggcgcgctttttcaactgcgttcggaaacacttcggcgaattgatagcctctcttttgataaaacgccatcgcatgtacattatcattcgttgtaataagctttattcgttgacaatgtgcatatttagccgtctcttcaacctgctggagtaaagctgtgccgattcctttattttcaatcatactatctaatgaaataatttcacaatctttcccatctatcaagtatgtaatacagccaatgatttcgccgctttcatttactgcggcaaatccatctaattcatcacaccgaaaaatgccgctggaaatcgccatctcgggtgtaccccaatgcttggcaaaaaaatcggtcaacatctgtttcgctatctcattgtttgggatgatcatcatcataacactcctctattgaaagattgcatatgtactatcaatataaacaatatataacaaaaaaaatagatgttgaggtgacggcatggaaatcagcgatgtcatttacgggcaccaccatatagacggagtgctggaagagcttatcaaaagcgctcctgtgcaaagattaaaagggatctatcaaggcggagcaagctttttagtcaatcgaagatggaatgtgaccaggtatgagcactccatcggcgtaatgctcctcatcaaaaagctcggaggaacgatagaagaacagattgcaggtctgctccacgacgtatcacacacagctttttctcatgtggtcgacgttgtctttgaaaatcaagcagaagactatcatgaaaacatctttcaacaagtcattgttcactctgaaatcccggacattttacaaaaacacggctatcatactgaagaacttttatctgacgattcaaggtggacattgctcgaacagcccgcaccggagctgtgtgctgatcggacagactatacgctgcgtgatatgtaccgatatggacacattaacctgcacgaagcgcaaacctttttggatcatcttattgtgagaaacggaaggatgtttcctgatagtattgaagccgccgaatggtttgtcagtgtgtactacaaggaagtaattgatttctttttgaatcctgtgaatgtatatggatatgaatatttagcgcgagcattgaaggcagcgctgcggcatgatgtcatatctgcagaggatctgctgaaaacggaccaagaggtactgaacatcctgcgtgcatcaaaaaatgaagaagtcctgagcttgcttacatccattcatcccggcatacaagtaatagaggatgacatccagtacgatttccatcaaaagaagaaaatgcgcctaatcgatccatccatttttcttgatgacaaatggatcaaatcctcagatgtttctgaaaaggtgaggaaaatgggtgaggccgcttatcaaaaagcaaaaaaaggtgtgtatataaaaatcttaaatcagtaattgccgcctgacagcggctttttttatgtttggctttgcaaacaaaggggaataggacaaactgcgggaacgcattatgagaatatcagcgtatttacataccgttcgggggtatagtattatcgagagggcatgttttcattgtctgcgggcaaaagttacaggaaaaaaatgaagcaaaggagaatgaacatgaaaatctctaaaaatgcactgggaattctgatgttatctcttgtttttgttttatcagcatgcggcaataacaacagtacgaaagaaagcacacatgacaatcattcagactcctcaacacatgaagagatggaccattccggatcagctgacgttccagagggattacaggaatctaaaaatccgaaatacaaagtaggcagccaggtaatcatcaatacttcccatatgaaaggcatgaaaggtgctgaagctacggtaacaggtgcctatgatacaactgcgtatgttgtttcttatactccgactaatgggggacagcgtgtggatcatcacaaatgggtgatccaagaagaaatcaaagatgccggagataaaacgttacaacccggagatcaggtgattttagaggcttctcatatgaaaggcatgaaaggagcaacagccgagatcaactccgcggaaaaaacaactgtatacatggttgactatacatcgacaacaagcggcgaaaaagtgaaaaaccacaaatgggtcacagaagatgagctttcagctaaatcataaaaaatcctccttttacaaggaggatttttttgctgtctgaacaggtcttgttaaagaaatgaaagcaaacaggacagcgatgatcacaattgacccgccgcaccatgctgttgacaccacagtacccgtttgatccaaaacaacaccgccaatggctgagccaagggcaattccgacttggagggccgatgtgttaaagctttgctgaatgtcagacgaatcaggtgcaatttcaattaaatagctttgctgagccggggcgaggctccagctcagaagaccccaaatcaccatcacaggcaaaaagaaaatcatagacgatgtagacagcggcagtaagaacataatgatagcaaaggaaccggtcaccagcaaaatgctcttaaaggaaccaagccggtcagatagcgctcctccgaaagggcctccgcatacggcagatatcccgaaaaggaaataacaaatgctgacccagaaagagctcaggtgaagagtctcttctaaaaacggcgcaaagtaagcgtatagcgtgtagtggccagctaatgtaaacatcgtgacgaggtgtgaactcgcgattttcagattaccgatcgtcttgagctgttcccggaaaggaatcattttctccgccggtattctttcaaagaagattgaaataatcagcatggagatcagcgccaacaggccgatgccaaggaacaaaatccgccacccgaaggaatcgctgattaagattccgagcggcacacctaatgcgatagcagagctgaaacccataaaaataattccgattgcgcgggctctgtattcaggcgctacaattttcggggcaatcgttaaagaaagtacaacaatcagccctgtactcatcgccgccaataccctagataccatcaatgttgcgaaattagggctgaagtaggcgacaagattgctaaggaagaaaacaaataaagcaattagatataagcgcttccgctcaatcttcgcagtcaatgccaaaagcagcggcccagatactgcatatcccagcgcaaacacactgatcagctgtccggctgaaacaatggaaatgtctaaatcatttgcgatctgaggaagaattccccccacaattaactcaaccaatccgactgcaatcgtagaagctgcaagcaggaaaactttgaaattcataacaaactcctttacttaaatgttttgataaataaaaaaaatcctgattacaaaaaatgtcataaacaaattttgtaatcaggattttacggttcctggtagacaccctcaaaccatattattgaggttatacaagtgttaatagctatttaattgattcgtttccgttgatgagtgtaccacattatgaatgaatcttccatagaaaatttacaaagtaatgaaccggacaagtgtatgattatatttattttataaaagtatagacatttaaaagtgaatgactataataatcaatgtaagcgttttaattacaaggggggatagcagttgaaaaaaatattactcgcgtgcagttcaggaatgtctaccagtttattggtgacaaaaatgaaggaatacgcacagtctatcggtgaggaagcagagatttgggctgttggccaagataaggcaaaagaagacatgagaaaagcggatgccgttttgatcggtccgcaaatgagctttctgaaaagcgagctccaaaaagaagcagatcaatacaacattcaagttgaagtcattgacatgatggcctacggaatggcagatgggaaaaaagcgtatgagcaggcattgtccttaatggtgaatcaataatggaacagatgaaaatcacgaatttaacagacgagcaaatcagttttcagctaatcctgcacagcggaaatgcccgaagctgcatcatacaatcactgcgcgcctataaagaagggaacaaggacgaggctgatgccctcattgccaaggcggagcaggatttatccgcggcccatgacattcactttcaaatgatacagaaggaatccggcggagaagcaacagctttttcattgctgcttatgcatgcagaggatcatctgatgtcaacattatccatgaaagaattagtgaaagagatgcttgatctctttaaaaccaagaatatataaaaaataggggtggatagggtgttcgagaaaatcagccaattccttgttccaattgcagggaggttaaacaataaccgctatttgcaagtgttgcgtgatgcatttatgctggctttcccgctgacgatattcgggtccatttttgtcgtgttaacgaatttgccgtttctaaacaaaatcatgaacgcctcaatgcttacgtcgtttcagtctcatttcggcattgcctccacggcgacaatgggcattatgtctgtctttgttgtgttcgggataggctattacctgtcgaaaagctatcaggtcgaagctgtatttggcggagcgatcgctttggtttcctttttgctcttaacgccatttatcattcagccggaaacaggtgatgccattacaggggttatcccggtcgatcgtctcggtgcaaaagggatgtttcttgggatgattacggcatttctttctggcgaaatttacagaagaatcgttcaaaaaaacctgacaatcaaaatgccagccggcgttccgcctgctgtagcaaaatcatttgccgcacttattccggcttttatcacattgaccgtatttttgctgattaacgtaatggtgactctgttttttaaaacaaatatgcacgacgtcatttatcacgcgattcaggctccgcttgtcggacttggaagcggtatcatcccaacgctgattgccgtgtttttcattcaaattctttggtttttcggactgcatggacagatcattatcaactccgtgatggacccgatttggaatacactgcaggtagaaaacctttctgcttacacggcgggaaaagaaatccctcatattatttcaaaaccgtttatggagatttatacagtagggatgggcggaaccgggatgacgcttgcggttgtgtttaccattctcatattcatgaaaagcaggcagatgaagcaagtatcaaaacttggcctcgctcccggtatttttaacgtaaacgaaccgattatcttcgggcttccgattgtcatgaatccgatcattattgtgccttgggtgctggcaccgatggttgttacgctcgtcacctatctggctatgtcagccgggctcgttccgcctccgactggtgtgacggtgccgtggacggttccattattcattaatggcatcatggcgacgaactcaatcatggggggcgtgatgcaacttatcaatctgctgattgtcttcgtgatctggtttccattcctaaaagcaatggataaattaaatctggcaaaagaaaaagaacaggctgtgcaggaaacagctgctcagcaaaatgataacagcataaaaatgtgacataaggggagagagacttggcacaaacagaacaatatcgttttccaaaggatttttggtggggatcatcggcttcagcaacacaaacggagggtgccgccgacagagacggaaaaggccagaatatatgggattattggtttgaaaaagaaccgcatcgtttttttgatcatgtcggacccgcagacacatcccaattttacgacaactataaagaagatatcaggctgatgaaggaacttggccacaactcgttccggatgtcgatttcctggtcgcgtttaataccaaacggaacgggcgagatcaacgataaagccgcaaatttctataacaatgtcattgatgagttgatcgctaacggaattgaaccttttgtcaatttgtttcatttcgatatgccgatggcgcttcaaaaaatcggcggctgggtcaacagagagacggttgacgcgtatgaaaactatgcaagaacttgcttccgtttgtttggcggcagagtgaaaaaatggttcacgcataatgaaccaatcgttcctgtagaaggcggatacctatatgattttcattatccaaacaaggtcgattttaaagaggccgtccaggttggatttcatacgatgctgtcaagtgcccgtgccattcaggcttacagggagatgaagcaggacggaaaaatcggcatcatcttaaatttgaccccttcatacccgagaagcagccatccggcggatgtgaaagccggggaaatcgcagacgcgttttttaacagatcttttttagatccatctgtcaaaggcgaatttcccaaagagctggttgacattttgaagcatgaaggctttatgcctgattacattcctgaagatcttgacatcatcaaaaagaacacggttgacctgttgggagtgaattattaccagccgagacgtgtgaaagcgaaagaacatcttccgaatcccgacgctccttttttgcctgacaggtattttgatccctacgtcatgccgggccgcaaaatgaatccgcatcgcggctgggagatctatgaaaaaggcgtttatgatattttgatcaatttaaaagaaaactacggaaacatcgagtgttttatctctgaaaacggcatgggggttgaaggtgaagagcgcttcagagatgaacaaggcatcattcatgatgattaccggattgaatttataaaagagcacctcaaatggattcaccgcgccatacaggaaggctcgaacgtaaaaggctatcacttatggacgttcatggacaactggtcttggacaaatgcctataaaaaccgctatgggtttgtatcagtcaatcttgagaaagacggagaaagaaccgtcaaaaagagcggaaaatggttcaaaacagttgctgagcatagcggtttctagattttcctaaaggtcaagatcttccggcaatcatcataacgaatagagatgacgaaaatccgcaacattgatgaaatagggaaaagaacttatgatatccgtaaaagcttatgtgatatcagactctaacagctgccggaggatgccaatgaataaatacgaaattattgcaaatgaaatgagaaatagaattaaaaataacgtatatccgatcgatcagcccattcctgatgaagtatctcttgcaaaagaatttaactcaagccgcatgacgatgaagagagccttggataatttagttgctgagggtctgctgttcagaaaacgaggccatggcacgtttattattcaatctgcaatacaggatgaccatgtacatgtagtcagcaatgagattctcggattgaccaacttgctgaaagataaaaaaatccaaagcaaggtcattcagtttgaagtgcaatttcccactgaggaagtggccgcccatttgtctattgatcaaaaaacaccggtttattatgtcgttcggcttcgaattgtagaaggtgaaccctatgtattagaaaaaacatatatgccgactcatttaataccgggcattaatgacgatgtacttcatgattcgatctacaatcatattacaaatgtgctgcagctcaaaatcgccggaacgcatcggaaaatcagagcctgcaaatctgatcatattgaccagcagcatctgggctgtaaacaggatgatccaattctggaagtggaacatgtgggcttcttagataccgggattccatttgaatattccttttcacgtcatcggcatgacaagtttgttgtgacttctgtaaacatacggcgctgattgcggagacaacaaggaggccatctgcatgcttggcggtattgaagcaggcggcacaaagtttgtttgtgctgtcggtagagaagatggaacgatcattgacaggatagaattctccacaaagatgccggatgaaacgatagagaaagtgattcaatattttcgccaattttcattacaggcaatcggcatcggctcctttggtcccgttgataacgataaaaccagtcaaacatacggtactattacggccacgccgaaagcgggctggagacactatccctttttgcaaaccgttaagaacgaaatgaagatcccagtcggatttagtacagatgtcaacgctgcggcgctgggtgaattccttttcggtgaagcgaagggtcttgacagctgcctgtatataacgattggcactggcatcggagcgggggctattgtagaggggaggctccttcaggggctgtcacacccagagatgggccatatttatatccggaggcacccggatgacgtataccaagggaagtgcccttatcatggagattgctttgaaggcttagcttcaggccccgctatcgaagcccgctggggaaaaaaagccgcggatttatcagatatagcccaagtctgggaactggaagggtactatattgcccaagcgctggctcagtatattttgatccttgcacctaaaaaaatcattcttggcggcggcgtcatgcaacagaaacaagtgttttcttatatctatcaatatgtaccaaaaatcatgaacagttacttggatttttctgaattatcagatgatataagtgattatattgtacctccacgtttaggcagtaacgccggaatcatcggcacgctagttttagcgcatcaggccttacaagcagaggtagcatccggggaggtgcgatcatgacgcatcctttatttttagagcctgtctttaaagaaagactatggggagggacgaagcttcgtgacgcttttggctacgcaataccctcacaaaaaacaggtgagtgctgggccgtttctgcacatgcccatggcccgtcggctgtaaaaaatggcccgctggcaggaaaaacactagatcaagtatggcaagatcatccagagatattcgggtttccggatggtaaggtgtttccgctgctggtaaagctgctggacgccaatatggatctctccgtgcaagtccatcctgatgatgattatgcaaaactgcacgaaaatggcgaccttggtaaaacggagtgttggtatatcattgattgcaaagatgacgccgaactaattttgggacatcatgcaagcacaaaggaagagttcaaacaacgaatagaaagcggtgattggaacgggctgctgaggcgaatcaaaatcaagcccggagatttcttttatgtgccaagcggtacactccatgctttatgtgagggaacccttgtccttgaaatccagcaaaattctgatacaacgtatcgcgtatacgattatgaccgctgtaatgaccagggccaaaaaagaactcttcatatagaaaaagccatggaagtcataacgataccgcatatcgataaagtgcatacaccggaagtaaaagaagttggtaacgctgagatcattgtttatgtgcaatcagattatttctcagtgtacaaatggaagattagcggccgagctgcttttccttcatatcaaacctatttgctggggagtgttctgagcggatcaggacgaatcataaataatggtattcagtatgaatgcaatgcaggctcacactttgtcttgcctgcgcattttggcgagttttcaatagaaggaacatgtgaattcatggtatctcatccttaatgaatgggggagttgcatttgtttaagaaacatacgatctctttgctcattatatttttacttgcgtctgctgttttagcaaaaccaattgaagcgcatactgtgtcgcctgtgaatcctaatgcccagcagacaacaaaaacagtgatgaactggcttgcgcacctgccgaaccgaacggaaaacagagtcctttccggagcgttcggaggttacagtcatgacacattttctatggctgaggctgatagaatccgaagcgccaccgggcaatcgcctgctatttatggctgcgattatgccagaggatggcttgaaacagcaaatattgaagattcaatagatgtaagctgcaacagcgatttaatgtcgtattggaaaaatggtggaatccctcaaatcagcttgcacctggcgaatcctgcttttcagtcagggcattttaaaacaccgattacaaacgatcagtataaaaaaatactagattcttcaacagcagaagggaagcggctgaatgccatgctcagcaaaattgctgacggacttcaagagctggagaaccaaggtgtgcctgttttgttcaggccgctgcatgaaatgaacggtgaatggttttggtggggacttacatcatataaccaaaaggataatgaaagaatctctctatataaacagctctacaagaaaatctatcattatatgaccgacacaagaggacttgatcatttgctttgggtttactctcccgacgccaaccgagattttaaaactgatttttacccgggcgcgtcttacgtggatattgtcggattagatgcgtattttcaagatgcctactcgatcaatggatatgatcagctaacagcgcttaataaaccatttgcttttacagaagtcggcccgcaaacagcaaacggcagcttcgattacagcctatttatcaatgcaataaaacaaagatatcctaaaaccatttactttctggcatggaatgatgaatggagcccagctgtaaacaagggggcttcagctttatatcatgacagctggacactcaataagggagaaatatggaatggcgattctttaacgccaatcgttgagtgaatccgtaatgtcacaattaagaaggtgctcaagaagtttcttgagcaccttcccactggattaagcattcatatcgcctaacccaggactgtgttcatttggtatttcaggaagcactggtacgggaaaccctgccggaggatctattacttgtaactctccgccatttcggcttggagatttcccttgatagatttcactgattctcgtttcatccaacctaaagttaaactgtgcattatgatagcctaattcgacatactttctgcactcaggatatttattaatgtcataattcggtacagggagcagcttcgcccattcaacgcccaatgtctcgagcgctttcgcgaatgcattctggtgagcattgtcgcgtacaatcagaaaagcaagtgtttcgcggaacgtctgattagagctcatttcataaattcttgttttttgcagcacacctgtcgactcaagaagcaggttatccagcaggtcagtaattaagtttccgtggttatacacccacgacccgttccacggattgccccctgcatcaacaggaagggaactttgcgctccaataatataatgatgaggattagcatgtttaaccgcttcatcaagtggcgcttgatctgcaccttgactgccgacaccttcaccgcctgattcatctaataaagcattgattgtgttttgaaccagttcaacgtgggcaatctcctctaaaaaaatgccgcgaagcagatcgcggtactgtttctgctttcctctgaaattagagctttggaaaaaaaactgcatcattgtacgcatttctccgtaatgaccgcctaatatctcctgcaggaccttagcagctgccgggtctggcttgtccggtttaatgatattaatcagttcctctttgtagtaatacataacacgcctcatttcttcttaagagattttcttatattatttgtaagatgagataaaatatatacatgataagcatgggaagacgtgaaagaagaaaataaaaaaatacatgaaaagtgttgaccaaatgaaacaagcatggtatattattaaacgtcgctgatgaacagcgtgaaacaaaacgaaaaacaaaaaagtttttctaaggtgtttacaagattttaaaaatgtgtataataagaaaagtcgaattgaaaaagattcgaaaaaacattttaaaaaaacttcttgacttcaccatcaaatgatagtatgatagttaagtcgcttgataagcgcccgtagctcaattggatagagcgtttgactacggatcaaaaggttaggggttcgactcctctcgggcgcgccatttaagataccacgcgggtgtagtttagtggtaaaacctcagccttccaagctgatgtcgtgagttcgattctcatcacccgctccattattgaatgatctttgaaaactaaacaagacaaaacgtacctgttaattcagtttttaaaaaatcgcacagcgatgtgcgtagtcagtcaaactactttatcggagagtttgatcctggctcaggacgaacgctggcggcgtgcctaatacatgcaagtcgagcggacagatgggagcttgctccctgatgttagcggcggacgggtgagtaacacgtgggtaacctgcctgtaagactgggataactccgggaaaccggggctaataccggatggttgtttgaaccgcatggttcaaacataaaaggtggcttcggctaccacttacagatggacccgcggcgcattagctagttggtgaggtaacggctcaccaaggcgacgatgcgtagccgacctgagagggtgatcggccacactgggactgagacacggcccagactcctacgggaggcagcagtagggaatcttccgcaatggacgaaagtctgacggagcaacgccgcgtgagtgatgaaggttttcggatcgtaaagctctgttgttagggaagaacaagtaccgttcgaatagggcggtaccttgacggtacctaaccagaaagccacggctaactacgtgccagcagccgcggtaatacgtaggtggcaagcgttgtccggaattattgggcgtaaagggctcgcaggcggtttcttaagtctgatgtgaaagcccccggctcaaccggggagggtcattggaaactggggaacttgagtgcagaagaggagagtggaattccacgtgtagcggtgaaatgcgtagagatgtggaggaacaccagtggcgaaggcgactctctggtctgtaactgacgctgaggagcgaaagcgtggggagcgaacaggattagataccctggtagtccacgccgtaaacgatgagtgctaagtgttagggggtttccgccccttagtgctgcagctaacgcattaagcactccgcctggggagtacggtcgcaagactgaaactcaaaggaattgacgggggcccgcacaagcggtggagcatgtggtttaattcgaagcaacgcgaagaaccttaccaggtcttgacatcctctgacaatcctagagataggacgtccccttcgggggcagagtgacaggtggtgcatggttgtcgtcagctcgtgtcgtgagatgttgggttaagtcccgcaacgagcgcaacccttgatcttagttgccagcattcagttgggcactctaaggtgactgccggtgacaaaccggaggaaggtggggatgacgtcaaatcatcatgccccttatgacctgggctacacacgtgctacaatggacagaacaaagggcagcgaaaccgcgaggttaagccaatcccacaaatctgttctcagttcggatcgcagtctgcaactcgactgcgtgaagctggaatcgctagtaatcgcggatcagcatgccgcggtgaatacgttcccgggccttgtacacaccgcccgtcacaccacgagagtttgtaacacccgaagtcggtgaggtaaccttttaggagccagccgccgaaggtgggacagatgattggggtgaagtcgtaacaaggtagccgtatcggaaggtgcggctggatcacctcctttctaaggatattatacggaatataagaccttgggtcttataaacagaacgttccctgtcttgtttagttttgaaggatcattccttcgaaacgtgttctttgaaaactagataacagtagacatcacattcaattagtaatacaagatatcacaagtgattctttttaacggttaagttagaaagggcgcacggtggatgccttggcactaggagccgatgaaggacgggacgaacaccgatatgcttcggggagctgtaagcaagctttgatccggagatttccgaatggggaaacccaccactcgtaatggagtggtatccatatctgaattcataggatatgagaaggcagacccggggaactgaaacatctaagtacccggaggaagagaaagcaaatgcgattccctgagtagcggcgagcgaaacgggattagcccaaaccaagaggcttgcctcttggggttgtaggacactctatacggagttacaaaagaacgaggtagatgaagaggtctggaaaggcccgccataggaggtaacagccctgtagtcaaaacttcgttctctcctgagtggatcctgagtacggcggaacacgtgaaattccgtcggaatccgggaggaccatctcccaaggctaaatactccctagtgaccgatagtgaaccagtaccgtgagggaaaggtgaaaagcaccccggaaggggagtgaaagagatcctgaaaccgtgtgcctacaagtagtcagagcccgttaacgggtgatggcgtgccttttgtagaatgaaccggcgagttacgatcccgtgcaaggttaagcagaagatgcggagccgcagcgaaagcgagtctgaatagggcgcatgagtacgtggtcgtagacccgaaaccaggtgatctacccatgtccagggtgaagttcaggtaacactgaatggaggcccgaacccacgcacgttgaaaagtgcggggatgaggtgtgggtaggggtgaaatgccaatcgaacctggagatagctggttctctccgaaatagctttagggctagcctcaaggtaagagtcttggaggtagagcactgattggactaggggcccctaccgggttaccgaattcagtcaaactccgaatgccaatgacttatccttgggagtcagactgcgagtgataagatccgtagtcgaaagggaaacagcccagaccgccagctaaggtcccaaagtatacgttaagtggaaaaggatgtggagttgcttagacaaccaggatgttggcttagaagcagccaccatttaaagagtgcgtaatagctcactggtcgagtgactctgcgccgaaaatgtaccggggctaaacgtatcaccgaagctgcggactgttcttcgaacagtggtaggagagcgttctaagggctgtgaagccagaccggaaggactggtggagcgcttagaagtgagaatgccggtatgagtagcgaaagaggggtgagaatcccctccaccgaatgcctaaggtttcctgaggaaggctcgtccgctcagggttagtcgggacctaagccgaggccgaaaggcgtaggcgatggacaacaggttgatattcctgtaccacctcctcaccatttgagcaatggggggacgcaggaggatagggtaagcgcggtattggatatccgcgtccaagcagttaggctgggaaataggcaaatccgtttcccataaggctgagctgtgatggcgagcgaaatatagtagcgaagttcctgattccacactgccaagaaaagcctctagcgaggtgagaggtgcccgtaccgcaaaccgacacaggtaggcgaggagagaatcctaaggtgatcgagagaactctcgttaaggaactcggcaaaatgaccccgtaacttcgggagaaggggtgctctgttagggtgcaagcccgagagagccgcagtgaataggcccaggcgactgtttagcaaaaacacaggtctctgcgaagccgtaaggcgaagtataggggctgacgcctgcccggtgctggaaggttaagaggagcgcttagcgtaagcgaaggtgcgaattgaagccccagtaaacggcggccgtaactataacggtcctaaggtagcgaaattccttgtcgggtaagttccgacccgcacgaaaggcgcaacgatctgggcactgtctcaacgagagactcggtgaaattatagtacctgtgaagatgcaggttacccgcgacaggacggaaagaccccgtggagctttactgcagcctgatattgaatgttggtacagcttgtacaggataggtaggagccttggaaaccggagcgccagcttcggtggaggcatcggtgggatactaccctggctgtattgaccttctaacccgccgcccttatcgggcggggagacagtgtcaggtgggcagtttgactggggcggtcgcctcctaaaaggtaacggaggcgcccaaaggttccctcagaatggttggaaatcattcgcagagtgtaaaggcacaagggagcttgactgcgagacctacaagtcgagcagggacgaaagtcgggcttagtgatccggtggttccgcatggaagggccatcgctcaacggataaaagctaccccggggataacaggcttatctcccccaagagtccacatcgacggggaggtttggcacctcgatgtcggctcatcgcatcctggggctgtagtcggtcccaagggttgggctgttcgcccattaaagcggtacgcgagctgggttcagaacgtcgtgagacagttcggtccctatccgtcgcgggcgcaggaaatttgagaggagctgtccttagtacgagaggaccgggatggacgcaccgctggtgtaccagttgttctgccaagggcatcgctgggtagctatgtgcggacgggataagtgctgaaagcatctaagcatgaagcccccctcaagatgagatttcccattccgcaaggaagtaagatccctgaaagatgatcaggttgataggtctgaggtggaagtgtggcgacacatggagctgacagatactaatcgatcgaggacttaaccatatttttgaatgatgttacatctgttatctagttttgagagaacactctcaatttgtttggtggcgatagcgaagaggtcacacccgttcccataccgaacacggaagttaagctcttcagcgccgatggtagtcgggggtttccccctgtgagagtaggacgccgccaagcattacttttatcatcgcggggtggagcagttcggtagctcgtcgggctcataacccgaaggtcgcaggttcaaatcctgcccccgcaaccaaatatatgattaaataaggagtgccctaagggtacaactaaaataatcttatacaaatatggtccggtagttcagttggttagaatgcctgcctgtcacgcaggaggtcgcgggttcgagtcccgtccggaccgccattaatgtaaacgaaacgatcatgttttcgttttttttgtgttttcttttactgtatcttctgcttggtgtcatagccaagctttctttatatcgggaacatcttggatattccagcaaaattcgataaactaggaagagcacatataggcataagcagggttgaaaggagattttggttcatggatgaatttgatttgatacatagcattactccgcggaccattcaccattcttccgttgatgtaggaataggtgatgatgcagcgctctacactgcgaaacacggcgttcaggaaattgtttgtgttgatactatggtagaagacgtgcacttcaaattacactattcctcacctgaagatatcgggtataaggcgttagccgttaatataagtgatattgccgcgatgggaggcattccgaaattttatttggtatcacttgcggtaccttcaaaatggacggcatccgaaatcaaggcgatgtatgaaggaatgaatgaactggcgaaactatatcagatggatctgattggcggcgatacagtttctaccgctgacaaattagtcgttacagtcactgtgatcggtgaaattgaaaagggacaggcctgtttgcgcagcttggcaaaaccggatgatattgtgtttgtaaccggtgaaatcggttcttctgcagcagggctttctttattgctggaagagactaatcctcaaaactcatctgtggaaacggattactttatccataggcataaacggcctgagccaagagtaagcgtcggcagattatgctcgtgttttaaacgggcagctttaaatgatgttagtgacggattggctagtgaactgaacgagattgcagaagccagctgtgtttcaattgaaattgatgaaagcatgcttccaattcattctgatttacctaagcttcatcctaactggaaagaatgggctttgtttggcggtgaggattttgagctgacagggacggtttcaaaagaggagtgggaagtgttgaagcagcagtgcgcagcacgtcaacttcccattacaaagattggccatgtcagggaaaaaacaaaatctaaagtgatcctaaaaacagatcaaacatcaatgatcttagagaaaaagggatataatcattttaaataagacgggtgactcgtgtgaagcaattaaaatggagaactgtaaatccagaagaaacaaaagcaattgccaagcttgcggcagcgtttgctaaaccgggagacgtcctgacattagagggcgatttaggtgcaggaaaaacgacttttacgaaaggttttgcagaagggctgggaattacacgtgttgtaaacagtccgacttttacaattataaaagaatataacgatggcgtacttcctctttatcacatggatgtgtatagaatggaagatgaaagtgaagatttgggacttgatgaatattttcacggacaaggtgtctgtctcgttgaatgggctcatttaattgaagaacagctgccgcaggagcgactgcaaattgtcatcaaaagagctggtgatgatgagcgggaaattacctttactgctgtcgggaatcggtatgaaatgctttgtgaggagttaagtagacatgacaatattagcaattgatacatcaaattatacattgggcattgcgctgcttcgagaagacactgttatagcagagtacattacatatttgaaaaagaaccactctgtaagagcgatgcctgctgttcattcattgctgaatgattgtgatatggcaccgcaggacctttctaaaattgttgttgcaaaaggccctggttcttacacaggagtaagaataggtgtgacgttggccaaaacacttgcctggtctttagacattccaataagtgctgtatcaagtcttgagacgcttgcggcaaatggtcggcattttgacggtctgatcagcccaatctttgatgctagacggggacaggtgtacacaggtctgtatcaatataaaaatgggcttttagagcaagttgttccagatcaaaatgtgatgctggcagattggctggagatgctaaaagaaaaggaccgccctgttttgtttttaggccatgatacttctcttcacaagcagatgatcgaggatgtgcttggaacaaaagggttcattggaactgccgcccagcataacccgcgtccttcagaattggcttttctcgggaaggaaaaggaagcagctgatgttcatgggcttgtcccggattacttgcggctggcagaagctgaagcgaaatggattgaaagtcaaaagtagggtgataggatgaaaacaaaagcagcggtcagaaatatgcggcttgaagatatagatcaagtatacgaaatcgaagcatcctcctttacgtctccttggacgaaggattcgttttatcatgagctgctggaaaatccatatgctcattatctcgtgattgaaaaggacggccatcttgctgggtattgcgggatttggattgtgatggacgatgcccaaattacaaatatagcgataaaaccagagtatcgcggccagtctttaggagaaacgctttttcgctcagctgttgaactgtgcaaagaaaaagacgcaaggcggctttcgcttgaagtgagggtttcgaatcatcctgctcaaggcttatataagaaattcgggatgcagcccggcggaataagaaagaactattatactgataacggggaagatgcgttaattatgtgggtgacgataaatgagtgagcaaaaagacatgtacgtattaggaattgaaacaagctgtgatgagactgctgcagctattgtgaaaaacgggaaagagatcatttcaaacgtagtagcctctcaaattgaaagccataagcgcttcggaggcgttgttccggaaattgcttcaagacatcatgttgaacaaatcactttggttatagaagaggcgtttcgcaaagctggcatgacgtatagtgatattgatgcgattgcagtaacagaaggtccgggactggtgggagcgcttcttatcggagtgaatgccgctaaagcattgagctttgcacataacattccgttagtaggcgttcatcatatagccggtcatatatacgcgaaccgtcttgtagaagacatcgtgttcccggcactggcattggtcgtttcaggaggccatacagaactggtttatatgaaggaacatggatcatttgaagtcattggggaaacccttgatgatgcggcaggagaagcctacgacaaagtggcgcggacgatgggattgccatatccgggtggaccgcaaattgacaagctagctgaaaaagggaatgacaatattccgcttcctcgcgcatggcttgaagaaggctcttacaacttcagctttagcggattgaagtctgcggtgatcaatacgcttcataatgcatcccaaaaagggcaagagattgctccggaagatttgtctgccagtttccaaaatagtgtgatcgatgtcttggtaaccaaaacggcgcgcgcggcaaaggaatatgatgtcaaacaggtacttttagccggaggagtagctgcaaacagaggcctcagagctgcattagaaaaggaatttgcccagcatgaagggattacgcttgtcattcctccattagctttatgcacggataatgctgcgatgattgctgctgctggtacaattgcttttgaaaaaggaattcgcggtgcatatgatatgaatggccagcccggccttgaattgacttcttatcaaagtctcacgagataatagcgtgagactttttatctgtttgttattaacagataattcacaatttatccacatgtctgtgagtaattatagagatatagatggataaagggctgaagtcactgttaataaagtggataaattcagaatattttgtggatattgtgtataaagcgcttactttgttttgcttattagggtatgttctgtggataaaaagcacctctaaaaagaggtgcttgacttttttaatcttcttctgtggatagttcttcccattcggacaaaagagattccagctcctgattaagcttctcattgtctgcatggatagcttgtactttttcatgatcctgatagacttcagggtcacatagcaattcatcattgcggctgatgttctcttcaatggtttgaacagtggtttcaatttcttcaatccgacggagtcgttggcgctctttctttttccattctttttcttcctcgtaggaacgtttggagtcagacttcacagtagctggcgttttttcagtttcttcttgctgatttattttctccaattcaaactgctctgtttttttctcagtataataatcgtaatctcccagatactcctctatatggcttgaagaaagctccaatactcttgtggcgattctgttaataaaatatctgtcatgtgagacaaataacagtgtgcctggataatcaatcagcgcgttttcgagaacttctttgctgtctaaatccagatggttcgtcggttcatcaaggatgagaaagttggctttttgaagcatcagcttagctagagccaatcttgctttttcgcctccgctcagtgaatgaactggtttcagcacatcatctccggagaataagaaatttccgagacacgttctgatttctttttctgggagcccggggtactcgtcccacagctcatcaaggacacgtttagaggaagtcagctcagcctgttcctgatcataatagccgacactgacatttgagccgtatgagatcgttccttgatctggttttagggtgtctatcaatgttttcagtaatgtcgatttaccaattccgttagggccgacaagcgctgcgctttctcctcttgtgagcatgaatgacacttctgttaaaagcggcggctggttttcatagctgattgtgagatcctgaacacgaaggacttcatttccgctctgttttgtaatatcaaaatgaaagtttgcggatttttcatcgccaagcggttttgacatgacttccattcgctcaagctgctttctgcggctttgcgcccttttggtggtagaggctctcgccaggtttcggtctacgaagtcctgcagctttgtaatctcgccctgctgcttttcatacattttaagatctttttcatactgcgcggctttttggtcgagataagcgctgtagttgccgtgatactttttgctttctgctcttgatacctcgtatacctggtttactactttgtccaaaaagtagcggtcatgcgaaacgatgagaatggcgcctgaatagccttgcaaataatgctcaagccaggtaagcgtatcaatatccagatggtttgtcggctcatcgagaatgagcaaatcaggctgtgttaacagaagcttacctaaagccagtcttgttttctggcctccgctgaggctttgaacctgtgtagaatcgtcaaaatggctgaagccgagaccatgcagcacagatctaacatccgcttcatattgatagccgcctttatctttgaattcctgctgaaggcggtcgtaggttttcatgatgctttctaattcaccggggtcagctgccgccattttttcttccatagcccgcatttccttttccattgcttttaagtggtcaaaaacagtcagcagctcttcttttatggtaagcttagaatccaagccagtatgctgagcgagatatcccattgtaatatctttcggtttaataatttcgcccttttcatacgaaagctggcctgcgataattttaaggagcgtagattttccggcgccatttcttccaacaatggcgatgcgatcacgatttctgacttccagctttatattgtttaaaatagtatcagcaccaaacgatttggacagctgattaacttgtaagatcatcatattatttcacctctgctataataagttaagtgtagcttatgaaccagaagtcagcaaacaatacattggccatataagacatagagaagaaaatagtgtatgatctgtttaaggagcgttttaatatgaatggattttctcattttaatgaacagggcagagcccagatggtggatatcagcgaaaaatcttcgactgtccgtactgcggcggctgtttcaagcgtacacatgaagaatgaagtgtacgagaaaatacagagtcacgatatcggcaaaggagatgtactggctgtcgcacaggtggcaggcattatggccgcaaagcaaacgtcgaatatcattccgatgtgccatccgctttcattgagcgggatagatatatcgtttgactggaaaataaaagaagcagaagttatacttcatataaaagcacaggtcaaaacaaaagggagtacaggtgtggaaatggaagcgctcacttctgcatcggtgtgcgctcttaccgtttacgatatgtgcaaggctcttgataaggggatggtcatcggccctactttcttgctggagaagacaggcgggaaaaacggtgactttaaaagagaactatccgagtataatttggaggaccaaaaatgaataaggatcaatcaaaaattccgcaggcgacggcgaaacggctgccgctttactatcgctttttaaagaatctgcatgcgtcaggaaaacagcgtgtatcatccgctgaactcagtgatgccgtaaaggttgattctgccacgattcggagggatttttcctattttggagctcttggcaaaaaaggatacggatataatgtggattatttgctgtcttttttccgaaaaacgcttgatcaggatgagatgacagacgtcatcttgattggtgtcgggaacttgggaacggcatttcttcactataatttcacaaaaaataataacacaaaaatttctatggcttttgatataaatgagagtaaaataggaactgaggtaggcggcgtgcccgtctataaccttgatgaccttgaacaacacgtaaaagatgaatcagttgccattcttacagtgccagcagttgccgctcaatccattacagacagattggtcgcattaggaatcaagggaatccttaattttacgccggcccgtttgaatgtgccggaacacattcgaattcatcatatagatttagcagttgagcttcagtcactggtttattttttgaagcattattcagttttagaggaaatcgaatagagggaaaggaggagcccaaatatgccgatcggtcctggaagccttgctgttatcgcaatcgttgctctgattatcttcggtcccaaaaagctgcctgaattggggaaagcagcgggagacacacttcgtgaattcaaaaacgctactaaaggattaacgagtgatgaagaggaaaaaaagaaagaagatcagtaagttaggatgacacgaatgaaagtgaatcaaatgtcgctgctggagcatattgctgagcttcgaaaacggttgctgattgtagcgctggcgtttgtcgttttctttatagctggattttttttagcgaagccgattattgtgtatctgcaagaaacagatgaagcgaagcagcttacgcttaacgcgtttaacctgacagacccgctttatgtgtttatgcagtttgcgtttatcatcggcatagtcctgacctcgccggttattctttatcagctttgggcttttgtgagcccgggtctctatgagaaagagcgcaaagtaacgctcagctacattccgatctctattttgctgtttttagcgggcttatctttttcatattatattttatttccttttgttgttgattttatgaagcggatctctcaggacttgaatgtcaatcaggtgatcggaattaatgaatattttcattttcttctgcagctgacgattccgtttggactgctgttccaaatgccggtcatcctcatgtttttgaccaggctcggaattgtgacaccgatgttcttggcgaaaatcagaaagtatgcgtattttacgctcctggtgatcgcagccctgattacaccgcctgagcttctgtcccatatgatggtcacagtcccgcttttgattttatatgaaatcagtattctgatatcgaaggccgcctatcggaaagcgcagaaaagcagtgcagccgatcaggacgtgtcttcggggcaataataaaaaatccatttctcatgagagaaatggattttctttatttttggttctttttgattttaaatgaaaaggcgaacatcttaaaagaaatgctgatgttgtaagcggcgaacaccatcagcaggatggagtaaaatgaccacatgctgcctggcgagcttgcggcaagataagtaaagatgcaccctacggcaaagtagatcattccccaaactaccgggtttctcataaaaataatcctccaataatcaattgcatttgtgtgctctgctgttcaaggtaattccgaacaggctcaagctgcatgatgacgacgaatgtattcatcattaaatgggcgaaaatcggcacccatatccgttttgttctcgcatataaaaaggcaaaggtaaagcccattgctgtatatagaagaagatgcttcaaatcagcgtgaacaataccgaagataaccgagctgatcagtcctgcaaaaaagaaattcgttttttcgtacagcgcgccgaaaatgatttttctgaagatgatttcttctaatataggcccgacgatggaagaaacgataatcatgagcgggactgcctgaatgacatccagaatcgcttgtgtattttctgattctcttccgatgccaaaaacataatattcaatagagcctgctattccttgagagaaaagggcaatgaaaaaaccggctatcgcccaaaggatagaaagtccgattgagtccttctgtccgtttcgcagcgtttctttcggaacggttctcagaatgagcagaacaacaacgagacaggcgataaagctgataacggaccataatccttgtgcatgcagcatattttcatctgtaggctgtcctccggcataaccgaatttaaataacaagggaatcgcgattaatgcggaaaactgcatgatgatatatgtcaaaataataaaccaatactgttttctcaaatggtatgtactcctttgttaagtgggtttcgttcatctacagctattgtaacataatcggtacgggggtgaaaaagctaacggaaaagcgagcggaaaagaatgatgtaagcgtgaaaaaatttttatcttatcacttgaaattggaagggagattctttattataagaattgtgttagcactctttagtgctgagtgctaaaattacatattcatactattgaggaggttattacattgttaaagccattaggtgatcgcgttgtcattgaactcgtagaatctgaagaaaaaactgccagcggaattgtgttgccggattctgcaaaagaaaaaccgcaagaaggcaaaatcgtggcagctggttcaggtcgcgtgttagaaagcggagagcgcgttgctttagaagtaaaagagggcgaccgcattatcttctcaaaatacgcaggtactgaagtgaaatacgaaggtactgaatacttaatcttacgtgaaagcgacattttagctgttattggctaattcttaaataaacaatatttaaaacatttgaggaggtcttgtaaacatggcaaaagaaattaagtttagtgaagaagctcgccgcgcaatgcttcgcggtgtcgatgcacttgctgatgctgttaaagtaactttaggaccaaaaggacgcaacgtggttctagagaaaaaattcggttctccgttaatcacaaatgacggtgtaacaatcgctaaagaaatcgagctagaagacgcgtttgaaaacatgggtgctaagcttgttgctgaagtagccagcaaaacaaacgacgttgccggtgacggtacaacaactgcaacagttcttgcgcaagcaatgatccgtgaaggccttaaaaacgtaacagcaggcgctaaccctgtaggcgtgcgtaaagggatggaacaagctgtagcggttgcgatcgaaaacttaaaagaaatttctaagccaatcgaaggcaaagagtctatcgctcaggttgctgcgatctctgctgctgatgaggaagtcggaagccttatcgctgaagcaatggagcgcgtaggaaacgacggcgttatcacaatcgaagagtctaaaggcttcacaactgagcttgaagttgttgaaggtatgcaattcgaccgcggatatgcgtctccttacatggtaactgactctgataagatggaagcggttcttgacaatccttacatcttaatcacagacaaaaaaatcacaaacattcaagaaatccttcctgtgcttgagcaggttgttcagcaaggcaaaccattgcttctgatcgctgaggatgttgaaggcgaagcacttgcaacacttgttgtgaacaaacttcgcggcacattcaacgcagttgctgttaaagctcctggcttcggtgaccgccgtaaagcaatgcttgaagacatcgctgtccttactggcggagaagtcatcacagaagatcttggccttgacctgaaatctactcaaatcgctcaattgggacgcgcttctaaagttgtcgttactaaagaaaacacaacaatcgttgaaggcgctggcgaaacagacaaaatttctgcccgcgtgactcaaatccgcgctcaagtggaagaaacaacttctgaattcgacagagaaaaattacaagagcgtcttgctaaacttgctggcggcgtagctgtcatcaaagtcggcgctgcgactgaaactgagctgaaagagcgtaaacttcgcatcgaagacgccctgaactcaactcgcgcagctgttgaagaaggcatcgtatccggtggtggtacagcgcttgtaaacgtatataataaagtcgctgcagttgaagctgaaggcgatgctcaaacaggtatcaacatcgtgcttcgcgcgcttgaagagccaatccgtcaaatcgcacacaatgctggtcttgaaggatctgtcatcgttgaacgcctcaaaaacgaagaaatcggcgtaggcttcaacgctgcaactggcgaatgggtaaacatgatcgaaaaaggtatcgttgacccaacgaaagttacacgctcagctcttcaaaacgctgcgtctgtagctgcaatgttcttaacaactgaagccgttgtcgctgacaagccagaagaaaacgctggcggcggaatgcctgatatgggcggcatgggcggtatgggtggtatgatgtaataccgacaaaaaacccttgatttacaaggggttgtcggcaacggacgtcatttttgatgccctttataacttttcgaggcttctcatgagttcactgaacttgtgagaagcttctttttttctgtctttcgtagtttgattttttcagcactgttctatatcgattttcaatagttttgataatcccgatatgaactattcaattgaccaaaatacaaaattctaccggctcagattcctgtttacgtcttctttgataaacggcttactgtaacttcagtaaactgcatttctgttatgattataaaaagggtttaaaaatttttcgtccaaacctctgttacttctctccctattgcagacaggagatggtatcctctcatacagacaaaaaagccccagttttctaaataaatagtgtcaccaacactcttagaagtttccctaaggagtacattgccaaagagaaatcctattaaaatgtctatttgtgctgctttttagctactaagacgatgtatgttaaagatatagaacggcagaataatctgattctcaaaaattcactgtcggtgtagttaggttcttccaccaacatcttgataatattcatcccgactctatggagaccgacattccaattattaaatctaatattagttttttatgattaccaaggaggacttaatagtgcatttttcagaaatgatagatcgcttggctttatatgatttacacagaaaaagaagcaaagataaacatttttctgctgctattgcagccgatatcgatgatagagaggaattttacagtgcgaatatagctgatgtttcaattgatttgaatgaatctaaaaaaaagtatagggttggaacatttcgttatgaatccttaattcaaactgggaatcctgttaatgatactttaaaaggggaggtttttttacataaaaatgatatagatcaacccaatgttatctttgtacacggctggcgcatggaatcgtacaataggatcaaaagaatatttcataagcgtataatgaatgatttaggctggaacatgtattattattctcttccataccattttgaaagagaaccggaaaattcactgtatagtggcgagttgatgattagtgcgaatattgatcgtacaattgagtcgacaagacaggccattgtagatttacgggcattaattcactggataaaagcaaataaaaaaggccctgttatcatagtgggggtaagtttagggggatggatcactaatctaattgctaccctagaatctcaaattgatgtagtggtatcaatcttttatgccaatcgcctttcttattcaatatggaacacgatcccaggtaaattcataagagaagaattagaacaaaatggtgtgacctatgaagatttaacaaaatattggaatatcacagatcctagtcaagccttgccgaaagttaataaagataacattctgctgatttctgctaaacatgatcagtatattgacttaaaagatgcagattatttatgggaaagttgggagaaaccgaaaagatatgtctataattgcggtcattccggcattgttctttgtcgcaaaaagctggcaaatgatacgatttcctttataagagaaaggataaatacgggaaaacctggttcagtacatttgtagaccttaataagaaacaaaaggccaactgcaacttcagttggccttttctatttataataaagaaactgggtgagattgctgtcagaactactatgcgtactagtcgttttctttaatcaccattgccagttcttccacctcaccccgaatcccaatcgcaggctcccacgaatcaatcaaacgaatcgctctctgattagcttccatcgctttcgttttctctcctttacggttcaacagctgcgccatcccgtaaaaataatagatcaactcaacctgattggcgttatgtttgtcatagagcatttgctcaaaggcttcttccgctttctcaaattgaccacatttcacgtaagcgacacccagattgaaataggcttctatcgttttttcgccgccgtacgtggagctgatttcatttgccgcttcgtataattgaatggcttcttcatgatgacctctcgcaaagcttaagtcaccgcgaaccaaaagaactctgtgttgaatggtaggagaaattggttgatcttcgatttcgtttaaaatggtctctgctttttcctgttgcccgtcttttaaaaacagccttgctttgagtgcatgtccccaaacctttagatcataggcatcgtgagcatctgattgttcaagaatcttcagcccggcttctatttgctgtaaggccctgtctaaatcattgacttccatcagagcccagcctgctgtgtcgattcggaagtacgcttctcgtgtgtgttggcctaagtgatgggcggcgtcggccgctttgcgtccgtattcgattcgcaggggcaggttgattctgcttagaaaatggctaatgcgggtgatgagttcgattaggatttctttttgttcagtttcacttgcccattggatgacctttaagatgtttggccattcttttttcatttgatctaagttccgtcccagcaggtagctccaatagatagagttgggctgttcccgctttaaatgggtttcggcataatcaacataatagtgcgcccagcgattgcgggcttctttttcatattcgtgctgttcggacaagtgctgttctccgtaagcgacaacggtttggtgcgctaagtattgtgtccttccttcgcttcgttccggctgaatcagagcgtatgaccgcatttgttccatagcgtaatgaaaacggcgggcgtctaatccggctgctgccgccaggcttttttcatcaggcggcttgctgaaaaagcaaagcgtctgccagagctttcgtgtatcttcattgcatctgtcccaggtgcggccaaagaggaattcaaacaattccagcagtgagtagcctgcttttccaagctcatgaatcaactgctgcgcggggatgtcatcgtctgacatataggcgatgctgagtgccatggctttcgggtttccagcagtcgctgaaatgaattcgtttttcagatcagatgatagatgtaacagctgctccagcttttcccgcttatgtgggaggttgcatgtttgtaagcagcggtgcacttcttgctggaaaaatttcaaggcatctgtttggttaaggccgctcagctgaatagctgtcatttctccgaagctttcccgataagtttgctttacgttttcccgcgctgtgaggagaactttcacgccttgcggaaggctggtgataaattcatgaatgtcacgttctgcagtatcaatgctgtcaacgatcagcaggatcggtttttctctagtgtaattagctaacgcattgcggacgacgaatcgtttttcattgattgatttatcgatttgttctgtacgtccgagctgataggcgatcgtatttaaaaaatcgctaaagctcaatcctttccaatcagcgctgacccaaatgatactgttgaacgccggccaatctgaagtatcgtcgacacaggaataggctgcttcaagagcgattgtggttttacccataccagcccagccggtgattaaacagactggtgacggagaaagcatccattgccgtatcgcttccatatcaaagctgcgtccgataaagcgtccggaccagcgtgagggtaaattatgagtgataggctgttctgtaagcgcattcgtttcatggccgggtctgtcatgaaacagccgttttactacattttcaatttcgtcttcactcggagccccgaataatccgtcttttcgcagtattttcgcttttttcaaacaggatgctgcccatacaggcaatgcgggtttgatgactgggatagtggtggcttccagcaagtcggtcaaccactcgatatccaagtcggtcttttcgagaatgatccagatcattccgaacagttttccgtcgtcgattcttccgggaatgtagtttgctcccatctgtccgatccagcttttgatcgtgtttggggagactcccagctggagtgcgattttatctatgtaagactgtcctgttttttcattctttttccttctgattttataatcaggatgaagttttagcgttttgacgccaggtgccagcagttgtgcaaattgttttcggttttcaagttcagccataagcctgcacctcctattagtactattttatcaatccagcgttttttgtatatgaaaaaataaaagtacagtgccgctgtccttttatacagcaggaaaggctgttgaacgtgttgaaaagcagataaaatgggggcagtaacagagaaaacaaaaatgtatgcacttacattttattttctaaagaaaggaacttgccaaatgactcacacagtacctcaaaacatgaaagcggctgttatgcacaacacaagagagatcaaaattgaaacattgcctgtgcctgatatcaatcatgatgaagtgttgattaaggtgatggctgtcggaatttgcggatctgatctgcattactatacaaatggccgaataggcaactatgttgtggaaaaaccatttatccttgggcatgaatgtgcgggtgaaattgccgctgtcggatcatctgtcgatcaattcaaggtgggagaccgcgtcgctgtagagccgggtgttacgtgcggacgctgtgaagcgtgcaaagaagggcgctataatctttgcccggatgtacagtttttggctacaccgccggtagacggcgcgtttgtccaatatattaaaatgcgtcaggactttgttttctctatcccagactcactttcttatgaagatgctgctttgatcgagccgttttctgtcggcatccatgcggcggccagaacgaagctacagcccggatcaacgattgcgattatggggatgggccctgttgggttaatggctgttgccgcagctaaagcatttggggcaggcacaatcattgtcaccgacttagagccgctgcggttagaagctgcgaaaaaaatgggagcgactcatattattaatatacgtgaacaggatgcacttgaagagattaaaacgatcacgaatgatagaggcgttgatgttgcttgggaaacagcagggaatccagcggcattgcaatccgcactggcttctgtgcgccggggcggaaaattggcgattgtcggtttgccttcacagaacgagattccgctcaacgtgccgtttattgcggataatgagattgatatttacgggatcttccgttatgccaatacgtatccaaagggaatcgaatttctcgcttccggcattgtggacacgaagcatctagtaacggaccaatattctctggagcagacacaagaggcgatggaacgggcgcttcaatttaagaatgaatgtttaaaagtgatggtgtatccaaatcgctgagtgaacagggaggatcttcgtattctccctcttgtttactggaaatgaaaacggattcttggggtgggaaatgatgattgaaacagaaaaagtaacggcaatgaaagtgaagcatcagtcaaaatccagtaccggactgtcctggtttgaacgaatcggttatggattcggtgatatgtcgtataatattatctttcagtttgtaaacgcatacttattattttattatacagacgtcggcggcattcagcctgcggtgatcgcaactttgtttcttgttgtgcgtgtgctggatgctatttttgacccgatcatgggattgattttagataaaacgaatacaaggtggggaaaagcaaggccatatttgctgtgggtggcatttccttttgcgctattcacattcttatgtttcacgacgtctcatttcggtgagaccggaaatatggtatatgcgtatgtcacttatattctgcttgggatgtcctttagtatgcaaacgatcccggtgaacagcttaacggggcggatgacgaattcggtggaggaacgaacggttctgaccacaacccggatgattttggtgtatatcggcattcttttatccatttcctgtgcgacaccgcttgcaactgctatcggaggagaggatcaggcgtttggatttcaaatgacggcgctcatctatgcggctgtcagcatcgttttgaatctatttagtttcttttctgtacgggagcgaattcagcctaaaaagagaaaaaaacaagggatcaaaaagacattatccgttttattccgaaacaaacccttgcttatgttaatttcatcatttttggcttttgcgatcgggtttaatattaaactcagcacgatggtgtattattttacgtataacgtcaaccataaagagttcgtatttatgggcaccgttttatttttcggagcagcgctgatcagcaatttgtttattcctttcttttctgagaagtggggcagaaaacaagtcatgatcatcacggcagctctatcgcttatttcttatgccggcctgcattttacgccgtattcttccattacactcattttcatttggcttttcgtttcgggatttttcacaacgcctttaaatacgcttgcttggggaatggtggctgattgcgtcgattatgcggaatggaaaaccggagttcgcgcggatggtgttgtgatttcgagcatgagctttattaataagctgggtgttgcgttagccgggtcattttcggccatttacttaggaatcgccgggtatgtggcgaatacagaccagacagttgcgtcattgaatgcgattaaaaatatgaatgctttgattccgggatttttcattttgctttctattattcttatcgccttctatcctttaacggaaaaaagatataaacacatcatctctgagctggagcaaaggtctgcgagataaatagatgtaaaatttttaatattcaatgttgtatttatggcagaaagtaatatactgagactgtaatctagactttataaatgagtgtgataatatgcgtagtcattctgtagtttgtattggggaattgttgatcgatttcttttgtaccgatgttgacgttgatttaatggaagggcgccaattcctgaaaagtgccggcggggcaccggcgaatgtgtcggcagcaattgccaagctgggaggagacgccgctttcagcggaaaagtaggaaaggatccgtttgggtattttctgaagcaaacattggacgctgtacacgtcgatacctctatgctggtgatggatgagaaagcgcctacaacgcttgcttttgtttcattaaaacaaaatggagagcgtgactttgtttttaacagaggcgcggacgctttgtttacgctggaggatattgaccatgaaaaactaaacgaagcgaaaatccttcatttcggctctgcaacggcactgctatcagatccgttttgctcagcctatttacggctgatgtcgagtgcggaagacaatggacagtttatttcgtttgaccctaactaccgtgaagatttatggaggggaagagtctcagagtttgtaagtgttgcgaaaaaagcgatcgctgtaagtgattttgtgaaagtcagtgacgaggagcttgagattataagcggtgtgaaggatcatgaaaagggagttgcgatccttcatgagatcggagccaacattgtcgctgtgacacttgggaaaagcggaacgcttctttccaatggaaaagaccgtgaaatcattccaagcattccggtgacatcaattgactcaacaggggcgggagatgcttttgtcggtgcggctttatatcaattggcaaacacggatcagattcaatctgtagatgctaattttgtgaaactgcgtgagattgtgtcgtttgccaataaggtcggagctcttgtgtgcactaaaattggagcgattgatgcactgccgagcttggatgagattgaagtttctttgtaaacattgaagatgtttcttgaaagtctttggacttttggaggcatctttttttattgcttacatttttgttcgggtaaaaagttgtgtattttttgtttgaaatgtcattttttattaaaaaagtgaaacttttaacgataataaatagtatatgtaacaagggttaccgaatttgctttaggaggaacgatataatgagtataattggaagatttaaagatattatgtctgcgaatatcaatgctttattggacaaggctgaaaatccggagaaaatggtagatcaatatttaagaaatatgaatagcgatttggctaaggttaaggcagaaacagcagctgttatggccgaggagcagagagcaaaaagagaatatcacgagtgccaggcggatatggaaaagatggaaagctatgcaatgaaggcgctgcaagccgggaatgagagcgatgcgagaaaatttcttgaaagaaaaacatctttggagtcaaagctttctgagctgcaggcggcgaatcaaattgctgcaaccaatgccgcacagatgagaaagatgcatgacaaattggtatctgacattggagagctggaagcacgtaaaaatatgatcaaggcgaagtgggcagtagcgaaaacgcaagaaagaatgaacaaactgggcgcttctgtttcaagtacaagccaatcaatgtctgcattcggccgaatggaggacaaagtaaataaggcacttgatcaggccaatgcaatggctgaactgaacagcgctccgcaggatgatatggctgatctgactgcaaagtatgacactggcggttcaagccaggttgatgatgaacttgcggcgttaaaagcgaaaatgatgctcgataagtaatacataggaggccgcagctctcggctgcggcgtcattttatcataagatgtgagagggaacggtaatgataatatcttataagtgtccgaactgcggcagtgatatggcatttgacagtgaaaccggctcgttatcctgcagcagctgcggaagacaggacaatattgaaagccttccgaaagaaaacattgcggcacggttttctgatgatgaagcaaaagaatatcaatgtgaaaactgcggtgccgttttgatcacggaagctgaaacgacagcaacgacgtgcagcttctgcgggggtgctgcaatacttgccgatcgattatcaggtcatttggcaccggcgaaagtcatcccatttacaatcagcaagcaagaagccgagcaggcatttcgaaagtggtgcaaaaaaggccttctgacaccaagaggtttcatgtctgccgatcgcattaaaagcatcaccggcatgtatattccgttttggatgtttgatttaaatagtgaagtacaggtgagagcaaactgtaccagggtccaccggtatgaagaaggggattatatttgcacggaaacagagcactttgaagcatttcgtgatatcaatctcgattatttgaaaatccctgtcgatgcctctgaaaaaatgaaagacgaattaatggacaaattggagccttattcatacgaagagctgaaggactttcaaacggcatatttggccggttatattgcggaaaagtacaattataccgatgaggagctttttccgagagcaaaagagaaaatcagcagttatatagattcatacatccattctactttttccggatatacgtcagtcaatgtgagggacaaacatattcacacgaaaaacgtgaacagcttttacgttttgcttcccgtttggatggtcagttacgattatgaaagagcagagcatatctttgcgatgaacgggcaaacaggaaaggttgtcggaaagccgccgatcagtcgaggaaaagtggcggcatggtttagcggaatagcaggcgggacatttcttgcgttgaagctcgtctcattgatgatgggaggcggattttgatgcgtggattttttggaaaagcgatctttgttgtgctggctgttttcatcatgatgcctttactggggatcgaagcggcaagagcttctgaatcacagcagcatgtgtacgatcgcgctcatctattgtcaaaagcggagatcggaaaacttgaatctctctcggcagagctgggtgcaaagagggacactgatttcatcattattacgaccaaaagcacaaacggtgaagatattgcagactataccggcgatttttatgatcgttacggaaaaggcagtacagctattttaacgattgatatggcggatagagaagtattcatctcgggctacgaaaaagctgaaaagtatttggacaacagcaggctcaatagcatcagaaatacgatttcatctgatttatccaatgaaaattattttgaagcttttgagacatatattcagctttcctataaagatatgggcataaaaccgggagtaaaccccgacaacatattctttacatggtggtttcagctgattgctgccatcgcagtcgggggaattgcggtttcaatcatgctttatcatgcaggcggcaaagtaacggttaatggaaatacatatatggatcagcgtacgtctgatgtgattgatcaatacgacacttatattagaacgactgtaacaagagaaagaaaaccatcagataaagacagcggcagcgatggcggtgttacgaaaggcggcacgtcatacagtgggagccgaggcagtttctagtagaagaaaatagagaaagggagaggcgtaatgtcgtttttcagaaatcaattagcgaatgtagtagagtgggaagaatttagagatgatatgattttttataaatggaacaatcgtgaaatcaaaaaagggagccgtttaatcattcgtcccggacaggatgctgtctttttgaacaatgggcgggttgaaggagtctttcaagatgatggcgattatgatattgaatcagaaattattccattcctttcaacgttaaagggctttaagtttggctttaacagcggcatgcgagctgaggtgctgtttgtcaatacgaaggaatttaccgtaagatggggaacaaaacaggcgataaatattccggcagcgggaatgccaggcgggatacccattcgcgcaaacggcacatttaattttaaggtgcaggactatatcagcctgattgataaaatcgctggcgtgaaagatcaatattttgtagaggatattaaaacccgtatcatttctattctggatcagcttctcatgaagtggatcacaagagaagggaaagatatgtttaatcttcaagcaaacgcttttgatattgccaagggaattcaagaggacttggatatgcaattaataagcgacgggatgacggtcactggttttcaaatcatgagctttaattatcctcaagaggttcaagatatgattacaaagaacgcttcctatggtatggttggggatgtgaacagataccagcaaatatcaatgacggatggaatggcatccggaaagatgagcggaggcggagcggcttcggatatggctggaatgatgatgggaatgaatatggccaatcagatgatgaaccaaatgaatcaaaatcagcaggcacagtcatcaggcccacagtcaactggcagcggaagcaaaccgaatttctgtccaaactgcggaacaaaaacgggcgaagccaatttttgtccgaattgcggccagaagcttgtataagaatcatacagtgaaaagtccggagtgatcagacactccggacttttttatttaggagaataagcgttacctattgcttgctcctgaacaggccattttcgagcacccgcttggataattcccagcagcaattgacgacgttcctttattgaattgacggcaatttgaaatgtttgctttgataaagccggtatgcctgattgttgaagctttgagatatctggttccggcggcgcttgttctgcaggatggatataggcagtatgaacggtatccaggtagtttttgatacttgagcgcgcttctttgatgtgaagctgattcggctgatattgttcaggaattccgtatttgaaaatggttagagcctcatccaatacagcaacagctataatggatgattcctgatgctgcgtgctgtggtaaaaatgaaggatggggaaggcgttatgctgagcggtcagctttcccagttctgatgaggcagcgacaagaagaaaatcaatgtcgtgaaaatctttgccattccatgcattatggacgatttctgttccgtcatgtcctagacttaatacactttgggcaaaggagcgtttttgattaaccgcactcaagacggaaatcaaatacgtgacagaaaacgtgatggtaagcagtccttgagctgtttcaataatcgtgacaagcttccataggcctccgttcggagcgaggtcgccatttcctaatgtaaacatgacatagccggaaaaataaattcggtctgaccaggaagccggttcttttgattgagtttccataagtgagtgagggtcactcgagtaaatcaaaacccacccgctccaaaatagactgatccatatcactaacgtcaggcataacagcagaggaccagccatacttagaacctttgcgtggtcaccgctgattttgcggcaacccttccacagccaggcagacaggcatcttgtgatcgggccggcaccgctctctaaccataacgtggtccataaaaaatcaatcatccctgctgtcaataataaaaggcctgcaatgatataaccctcattcattttggttgcctcccttaagtcagccttcttttattttcttctctatttccttttatcctaagtctgaaacaattgaacgaatgtttgattttagatgaagttacccaaaacttactcatttatcgatatgaacagaaaatcacaggatttttgacttgattcacacatttttatgaagaaaaacgttcattttccccttgaattggtgattttccttttatagagtaaaaaattttcagaaatttatattgactgaaagcgtttttataattatgataatatcagatataacaaaaatgtcactattatattactacaattgaactatcaagtgactattaaatgccaaatttacaaggttatgcacaaagaaatgaccattgttcttttagcgagaaatgaaatcgtttccatcaggactgacatgctaagaagaagggaaggttatgaggttattggataaaaacatgaacaactattttctgaagcctgcttacgaaatgtgaggaaggcagcagccctggaataagtttttgacatacgcattttgaaaaagactgggggaaacagtatgaataaacaaggcaatcaaatgtcatttttacgtacaattattttagtctccacttttggcgggcttctttttggctatgataccggtgtgctcaatggagctttgccgtatatgggagagccggatcagcttaatctcaatgccttcacagagggccttgtcaccagttcacttctttttggagccgcgctaggtgctgtgtttggcggcaggatgtctgattttaacggccgccgcaaaaatattttgttcctcgctgttatattttttatttcaacgattgggtgcacgtttgcaccaaatgttacggtcatgattatttcccgttttgtgctcggtattgcggttgggggtgcatccgtaacggtgcctgcctatttagcagagatgtctcctgtggaaagcaggggacgaatggtgacgcagaacgaattgatgattgtatcaggacagcttttggcctttgtttttaatgcgatccttggaacaacaatgggagacaactcccatgtgtggaggtttatgctggtcattgcgtcacttccagccgtgttcctgtttttcggcatgatcagaatgcccgagagtccccgttggcttgtttctaaaggaagaaaagaagatgctttgcgtgtattgaaaaaaatcagggatgaaaaacgggcagcagctgagctgcaagaaattgaattcgctttcaaaaaagaagatcagcttgaaaaagcgacatttaaagatctttcagtcccatgggtgcgccgtattgtgtttattggattagggattgcgattgtacagcaaattacaggtgtaaattcgattatgtattatgggactgaaattctaagaaattccggtttccaaacggaagccgctttaatcggaaatattgcgaatggcgtgatttcggtattggcaacattcgtcggaatctggctgctgggaagagtggggcgccggccgatgctgatgacaggcttgatcggtacgacaacagcgttattgctaatcgggatattctcacttgtacttgaaggatcaccggcacttccatatgtagtcctgtcattaacggtcacatttcttgcttttcagcagggcgccatttcaccagtgacttggctgatgctatctgaaattttcccgcttcgccttcgcggactgggaatgggtgtcacggtattctgtctgtggatggtgaattttgcagtcagtttcacgtttccgatattgctggcagctatcggcctgtccacaacgttctttatcttcgttggattaggaatttgctctgtcctgtttgtgaagaggtttttgccggaaacgaaaggactttctcttgaacagctggaggaaaacttccgtgcttatgatcacggcggggcgaagaaggattctggggctgaagtgattggataattaaaaaaagaatccgcacccgagtgcggattctttttggtttcaaattagttaggtctgacaaggattttgacttggcttttctctttaataagagccccgaagccttcctcgatcaaatcatctagtacgatttttttcgttacgagtttgtcggctgagaaatagccttctttcattaatgacaatacagccgggaagatgtcacggtatccgataattccttttactgtacgttctttgattacgatatcgttcggatggatttcagcacctttttcccaaatgctgacgatgacggtttcaccggcaattgtagtggactggatggcttgtcgtaacaccactgggacaccagtgacttcgaatgctacgtcaacaccgcctcctgtacgttctgcaatctcagcgactacatcgtctgttttagacggatcaacgatgatcgcgccaagctcctcagctttttgctggcgttcaggagaaagctcaacagcgtaaatatcagttgcaccggcagccttcagcgcttcaatgacaagaagtccgatcgggccgcagccgaatacagccgctttgtcgcctgctttgagtttgcttgagcggacagcgtatagagcaactgcagaaggttcaacgagcgcgccttgttcatatgataattcatcaggaagtttgaacaaaagctcttcatctacagagacgtattcagagaaaccgccgcctccgccggctaagccgaggaatcccatttgttcatcaaggttgtaggcgccttggtggccgtgtgtagcaaaaatcggctcgactacgacgcggtctccaactttataattttcaacgccttctccgacttcgacaacttcaccggagaattcatgccccattgtgacaggtgccgtttcatttgttaatgggtgcggtttgtcaaccggaataaagatcgggccgcccagatattcgtgtaaatcacttccgcagatgccgcaccatttgactttgatctttacttttcccggctccgtttttggctcttcgatatgttcaatacggatatccttttggttatgccatcttgctgccttcatggattaccactcctataacttttgatgtgagtaattccgcaccggtcaatatgaactgttcacaaaatcgccatttttaaaaccaaaaaagaaatgaaatttttatataatataatctacgtttttttgaaaaaagaaactttgaagaaaaaagggtctcgcacactcttttttctttatatgagagtatcaatcgtttacatagctatgaatttggtttgaacaatacggtaatggttcgttcatattgaatgcgacaactactctatcaataattataacgctaatactgctattataataggataatcttccatggtttattttagcagagtaacttttttgactttgtaacattactgtaaggatattgaaataaaaaatagctggttgatcgtgtataatcttcctagatgttaacaaacagggggacgaaatgttgaagaaagtcattttagccgcttttatcttagtaggaagtactttgggagcttttagtttttcatcagatgccagtgcgaaacatgtgaacggaaatattacttggtataatggagtcgggaaaaaaggctcttcaggtaagaaacttggacattgggattgtgcgaccaaaatcggatttgatgttcctagaaacgggacaaaaatcagagcttatgcaaaagcgaagcctaaaaaggtgattacggtttataaaaatgatgttggcagaatgcctaatgcagtgctggatgttagccctaaagcgtttaaagcgcttggatatccattaagcaaaggtaaagtagcggggcattacagctattaatgtacatatataatctggaaagcaagaagtcacattcttgctttttctattggtggagataaaagatgaaaaaaagaatcatattattattagcagtgataatagcggcagctgccgcgggggttgcgttttatgttgcaaaggataaaggctatgagaaggctgctgatgtttcagtcaataccgaaagcggtgatgagctgctggtttcaattacagatacggatctgctgacaaagtattatgaaaatgacaaggtgatccatgaggagaagctgaccagctatccggcatttgccttggatcaaaaacagcaggtgctctattatacgggcaataatgaacagaatgaaatgaggctttttaaattggatctgaagtctcataaaaaaacgatgctttataaaggcgcggagagtgcggacagtttgtttttatcaaaggaccgttcaaccatctatttccgcttaggaaaagcggacgaaagcaattttcggatcgccgcttttgatctgaaaacgaaaaagtacaaaaatctttatcctgccgctaatgatcaggataacaccgtcagcagcttcttttataaccaaaaaaacgattcatttgcattgcttcattattctgtagaagaagactacaagaaaacagatgaagcaaacgaaaagggcatcgacccagaaccgacaacgattcattttgcggaaggccgccaaaataaatttaatgagctgaaaagcctgaaccaatttatcagcgatattgctgtttctgttgatgataaacgtattttattcacatcatatacgcaaaaaggaacggagcaaaccgcttctattcaaatgctcaatgcggatacgaaaaaatatgaaagcatcatctcaaatcaaaaatcatttaagctgttaattgacgcacagcctcagttctctaaggatggaaagaacatttattttcttgccgaagccaagggggctaaaaagctgaaggacgaaacagggcgtgaagctaaggtgcggacgatttattcctatagccttgaaaataagaccttcaaaaaagtatgggaaaatccgaacggcatcatcaacagcttttctgtgattaactaataaaaaccactcggcataagctgagtggcttttttaatggacgaggtgcagggctaatgattcgagccatttaaagatatgaatcagaggtaccgacaaaaacagaagttcaacatatgagttcattgcaacattcagctttttgaacgcagctctttttttcaagtctttttgctgctggtttgagatcacgttatcactcctcgtatatccatattataccattgaaacagacaaaaaaagccctaaacgtttacagttttgggcttctttcttcgtatttggcctcttgcaatgagaggcttttattctgaaatatagaattttgtctccgttcggggtttgttgcttgcgggagactgcatttgttatagggaagaactagcttgttttcgtttggctgttgttttggagattcactaatgaacggatgccgtcgaccattttacttccgcacaaagggcacaatggcgtatcactgctggcgaagttttttcgggtccagccattacagtcttcttttgtgcattcccaagtactcacatcttcttttggcagcggttcttgatttcgtttgttatagtaagacataaagtcacttcttccctcatgtattttactgcacatttcttattgtctcatacttttccctaatctcctaattcctttttctttatgactttccaataaccccatctaaaaaggagaggagtgtgctgttaaaagcatctggctcttctaaaaacgggcaatggctgcttttaggaaaggtaacgagtgtcgcgtttggaatattgctgcgcaagtgttccccagctgctgtagagaaaaatttcttgtcttccccgaagcacagcaatgtcggcacattgatgttttggagggtgccccggtaatcagcggccgtttggttaaataaaatcgtgctagaaatggcagccggctgtttgaggatttctgccagcatccattctgtttcggtctcggcaggcggttctgcgaacatattctggatgaagctttcgtagaaaggcagcgggtcagtttgaatggcgtgcatcgctgtttttaagccgtcaaaatcaaatggaccatgttcccagccctcccattgatagtccgaagcggattgatcgatgatcacagcggcttgaatgttatcattcccaaactgattgagataatcccatacgacaaaagcacccattgaccagccggcaagaacgacatgatcaagctccattgcatttagaaattcccttatgtcacgggcatattgggaaatggtgtggccgtgaagcactttgtcagattcgccgtgtcctctaagatcaagacgaatacattgataattggcagaaagcgccgaaaattgtttgtggaaaaattgtccgctcatcagcaccccatgtataaacaggatcggcgtcccgctcccgtgtgtttcatagtaaaggcgtgtctgatcttctaatgtgatgtatggcatgtttctcctcctttagtttccatcatgagtatggctggctgctgttgagctgatgatgacagctgtcgcggctgcctgctgcgcttgaatggctgtttcgatagcggtgtatagtcctgattccatcagcagatttttctccatatgctcactgagatagaggctgacagcaattttaaaattcatttccttttgccatttaaaagctttttcctggtttaattcgtcagtgatgcacaaaaccgttttgatatctggctcttccagaaatgtgaggagagcaaggtctggataatgataatcctttggttttttgacagattcagtgatcgattgatatatctgtttgcaagcggaaacaagcatttcgggctctttttcactttgcaaggccagaatatggctgacctgatgtaagtactgtccttttttaaagccgttggctgccagcagctgatagcatgtttccgccttctgtagcgcctgcaaaccttctccgttttctccaagcagtacggcaagcggaacattctgagttgaagtgaggaaataatgatttttcttcatctgctgataaactgctagccccatgttcatctgttctttttggtttgtcgtttcagattttccggtgagcaagatcagagcggaaaggtatgtgaacatatcccgcttatatcctagcttcaccatttcattgtatacatcgataaaagtatgaaatgtttgttttgcctcatgctgaaaatgaatgtccagaatagatgcaacagtaaagcggtggtgtgaattgagtgttgagaagctgccgatgtttgatttgatatagctgctcaaatcataaaagcgctgaaaatcaaactctcttttattcacaatatatgcagaagaaatgagcattaatatctgatcgtgtgaaactttccattttaattttgattttaatttagcataaatggaaatgtattgctttattttttcatgtagatcgtgtgtgagcataaaaagcagctccttttgttgtttttacgtaatacgataaatagggccaaaggtttcataaagaaaaaacttgcctgctagaggcaagtttgtcggattatttatggggatctgttatatccatcggtctcatcatgtcatagtcttcatgctctagaatatggcaatgccatacgtatcgtccgctgtacggaccgaatgtcgccgcgattctcaggacttcacctgcatgcgcttgaatggtgtctttccagcccttttcacttggcggcggcgggacagccggaccggtataggacaattccccgctttcttgataacgggcgatatcaaacggccgccggtctaatacacggaaggagactagatgcaggtgaatcggatgtgttccgcgtgtcgggttgataatggaccatatttcagtagtgccgacttttggtgcttctgtgacgggatcgtgccagcgtttgttattaagcagaaggacgggtctgccgtattcgtcctgggtgcctgccagttttaacgttctgatgttttgtattctttcatgctgtaccgaagggtatgaggcgaggtacttcggctttctgctttcgtctttttgtgccaatggttttgtgactctgaattgcatgatattagcatctgtttcaggattgacgtcaccgccacagcccgcgctgtttgccaaaatgatcgattctccttcatatgctgtgaagtcaatgatgatatcgtaacgttcagcaggcgcaaggctgaaagaattcagtttaacagatcgcggcaggagacctccatctgaaccaatctgaataaactctccgccattatcgagtgacaggttataggttcttgtattggaggcgttgatgactcggaatcggtatttcctcggctcgacctccaagtatggccataccttcccgttgacgagtatggtttctccgcaaaaagccggaacgattgaaggattaggcagtgacggagaagggttttccggtgcgctcggataaaacaaagaaccgtcctcattgatcgtgcggtctgtgataagaagcggcacatcgtattcgtctgaaggcagttttaagcgtttttcctttgggtcatgaatgatataagcaccgacaagtccggcatagacatttagcctggtgagcgccatggcgtgatcgtgataccacaatatagccccgcgctgctggtttggataatgataaacctctcttttgaaataaggtcctgtttgttcaaagtctttggaaaaccaagcctcgggatacccgtcactgtcatctggcgtgacgccgccgtgtaaatgaacaacagtctttacctcggactcttcatgctggctgtcactgtgatgaatggtgtgatcaatcggaaggaaatgcgtggaaggtaggttattcatccattttacatatacgttttcatttcttttaacctcaatggtcggtcccggaaataagccgttgtagccccacaggcgggtcggagggagatcgcgatggagctgatgggtgcattcctccatggtcacttcgtagtatgttttttcttttgattgctgtactggctttagtgtatctgggattgggagagcatccacaaatttttcaagtgtcattttcatctgtccttatctaaattttccaaattggtactatagttaatgacaataaggacgtgatggttacaaaaaatcttcgtgctgcagactgcccgagaaagaaaataacaaaatcctaaacggcagtccgtttaggatttgatcagcattaaggcaggatatcgggttgctgctgtgtgactgggttggcagccgctttctcgctcaccttgcgttttctgaacacaaggtaagaaatcagaacgattcccgtgatgacgcctgtcagcagcagctcgtctctcatggaatcaataaacgccatggacactaaaattccacaaatggcgatgatggtcaagtaggttaggaaagggaagagccacattttgatcttcaatgcttctgggtttgttttttcgagttttttccgcattttcagctgggaaacagcgatgacaagatagacgagtaaagcgattgcgcctgatgagttgactaagaataaaaagacggtatccggtgaaaaatagttcattacgaccgcgatataagagaaaaatgtgccggccacaatggcttgtacgggaacgccttttttgctcaatttcataaaacggcgcggcgcttcgtttctttctgcaagtgaatacagcattctggatgtggtatacaaacctgaattcaggcaagagagtacggctgtgaggacgataaagttcataatctgtgcggctgcgggcactcctatatgctcaagtacagcgacgaaagggctttctaaaatatttgctgaattccatggcaacagcgccacgacaatggcgattgagcccacgtaaaagacgatgatgcgccatacaacggatctggtggcttttgtcacagattcgatcgggttggatgtttcccctgctgcaatggcaacgatttcagttcccataaaagagaagatgacaacgacaatgccgagcaatacggagctgatgccctccgggaaaaatccgcctttgcctgtaagattcgaaaaaccgactggctcactgcccggtgcaaagccaaaaataaaggcaaaaccaacgattagaaaagcaatgatagtcacaactttaatgagggagaaccaatattcaaactcaccgaaagacttaacggagtagacgtttgtcagggtgagcacaatggtcaagatcaaacttgtcagccacagcggaatatcatggaaccagtattgaataatgccagcaccggcaatggcttcgatcgagatgacgatcacccagaaaaaccagtacagccagccgattgtaaatcctgcccacggtccgatggcgtcgtgagcgtattgagaaaacgatccgctcgtcgggtttacggcagacatctcaccgagcattctcataataaaaatcaccaataatccggctaacgcgtaagaaacaacggcacccggaccggtcgagtgaatcactgaaccgctgcctacaaataggccggctccgattacaccggcaatcgaaatcattgtcatatggcgggtctttaattccttttttaatcctgattgagattggttcataagttacctccttttaaaatgcaatcattactgaatattatgataattgaaactctatcataaatatacagtttgtcgaaaattcatgtgagaaaatataacgttttatttcaaatttgtagtgttttgtttgcgctttcagcgaatgtgtggaaaaaatgtttcgttttttatttgctgtgtgattttgtgtactatttacaattcgatagaatgcgagaagcgctggtgtcattggatctgatgggctttttggcggagcaaataaattggatgagagaaaaagtgttccatcgtcactatttttctgtggcgggtgaatcatgtttctgtagacccactgcggttcagctttgtaagataataataggaaaatgtgagcggggaggaggttttgtatggagagatatgatgaactgaaaaagggagaatccggggcgctggtcagcattgccgcgtatcttgttctttccgcaattaaactgatcatcggttatctttttcactcggaagcacttacggcagacgggttaaataacacaactgacattattgcttctgttgctgtgctgattggcctgcgcatctctcaaaagcctcctgacgaagatcatccatacggccactttcgagcggaaacgattgcatcgcttatcgcatcgtttattatgatggttgtcggcctgcaagtgctgttcagtgccggagaatctattttttctgctaaacaagagacgccggatatgattgcggcttggacggcagcgggcggggcagtcctgatgctgatcgtttatcggtacaataaaaggctggccaaaaaggtgaagagccaggcgctccttgctgcggctgctgataataaatcagacgcattcgtcagtatcggcacatttatcggcattgtggctgctcaattccatcttgcttggattgatacggtcactgcgtttgtgatcggtctgcttatttgcaagaccgcatgggatatttttaaagagtcatctcactctttgacagatggattcgacataaaggacatttccgcttataaacagacaatcgaaaaaatctccggtgtgagccgtttaaaagacataaaagcaagatacttgggcagtacggttcatgttgatgtggtggttgaggtatcggctgatttaaatattacggaaagccacgatatagccaatgaaattgagcggagaatgaaggaggagcatgcgattgattattcgcatgttcatatggagcctttagaacaaaaataatggagcttcctgccacaggaagcttttttgtgtgttttggccagctttattggaaacaatttgctagaatcgtttttttatacagattgctttttgtggtaaagttaggttacattatgatgaattttgtagatgactaggaggaaaagaatggcatatcaagaagacctgcatcctttgctggggaaagcagttgaacatattaatagagtaatggttggaaaacgagacatcgccatactcagcttagcagcccttcttgcaaaagggcatgtgctgcttgaggatgtacccggagtcggaaaaacgatgatggtccgcgcgctggcaaagtcaatcggcgctgatttcaaaagaatccaattcactccggatttgctgccatctgatgtaacaggggtatctatctataatgcgaaaacgatggaatttgaatatcgtcccggcccaattatgggaaatatcgtgctggccgatgaaatcaaccgtacctctccgaagacacagtcggctttgctcgaagcgatggaagagggaagcgtcacggtagatggccatacgatgcagcttgccgctcctttttttgtgatggcaacgcaaaacccggtcgaatatgaagggacctatcctttgccggaagctcagcttgaccgttttttattcaaacttcggatgggttatccgtcctttaatgaagagcttgacgtcttatctcttcaggaaaaaagccatccgattgagacgcttgagccggttattgcaaaagaagacttcatctgtttacagagggaagtgcaaaatgtccgtgctgatgacagcattaaggaatatatcgttgaaattgtgcagaaaacgagacagcatccttctgttcaattaggcgtcagtccgcgcggctcaatcgccctcatgaaagcggcacaggcatacgcgctgctgcatcatcgcgactatgtcataccggatgatattcaatatttagctcctttcacgctgccgcaccggatgatgcttcatcctgaggcaaaatttgaagggattcaggcagaagcgatcgtaagggagatcatgtcagctgtgaaggtgccggttcaaaggtcgtcggtccgctgatgaataagaaatggcaatggctcgtatatggttggaagctgattatattaactttattgacggctgctgttttttcttatgcgatgtttcagggcggctttgtcagctggtttttgttttacgcgtttctcccttttgtcttgtatgccgggctgttggccttgtatccgctccgttcttttcaggcttcaaggcaaatggataaaacacaattgcatgcgggggacaggctgggtgtaacggttacgctgagaagaaagctgccattccccctgatgtatatggtgattgaagattgcctgccagaaggtatcgagtcattaaatcgagacggagccgcggccaaacggctcgtttttccttggtttaaacggagcatgacgatgtcgtatgaattagctcgggtaccgcgcggagagcatcactttcattctgtcagggtgcgaaccggggatgttcttggcttgattgaaaaaacagcattttttgagctggatgataccctgtttgtttatccattctatcagcgtttttcctatcaggtgaatgagaggcatcaggaagacggtgtaagcggttcttctcctattcatcagcaccattcctcagtcgcagcaagtgtgcggaattatcagccgggagaccgatttgctgcgttagattggaagacatctgcacggcggagccagctgatgacgaaggaatttgagccttctcgcagcaaaaatctgtttctgctgatggaccgtttttcctcagacgcattcgaagaggtcgtttcagtgacagcttcgattcttcattctgttttaaaaaacggcgcgggtgctggtctggcttccatcgggaaggaaaaaaacattttccctattcaggaaggggatcagcattttaagcacatgcttcggcatttagccatcgctcattgtgatgcggcagacccgataagccgatatgcacgggaagagctgggaaagccatctgttcgccaagctgatcaagttgttgtcacgggacagttaacggaagatatgctgcacctcgcagaaataggaggcggccgggttacggtgatactggcaaaagagaaagatgctgagctctctcaagctgaaaatgtcatgattgaacgcatgatgaaacgccaaatcagagttcgggtcatgaggggcgggcgagtttcgcgtgttgtttagaaagagaggtgactggttcacatgccgcacgatgatcacaaggggagccgtttgagcttgctgttattttattttctggcttttttattgctgtgggagtggctcaggccgcttgacagttttactgaaacgaaacatacaggcttttttagtgtctttatcggcttgacgtttctgctgacttttttcaggatgaggtggtttgttaccgttcctttttgtgtcttatttacattgatctcgatacacatcctgttttatcaaggatctatattcgacttgagctgggtcagctcttttttgcaggatgtctatctgaatatcacgctgattcaatctgggcaatggaatgacatgattccttcatttcggaccctgctgttttttgtgctgctgtggctgctggtctatctcctgcattattgggtgatttaccagagaagaattttgtttttctttatgatgacagtagcgtatattacgattcttgatacctttacgccatatgatgccacttttgccgtcatccgtatcgtgctgatcggcttctttatgctgggccttttatacttggagcgcattaagctgatggaaagaatcacactgccaaaaacatctgtcctgaaatggtttcttcctttatctgtattggttttggctgcaacgggattcggactcgccgctccaaaatcagatccggcctggcctgatccggtgccttttcttaaaaaaatcactcatcaagaccgcgtgtctgcaggggaaagcaaaatcggatacgggaatcatgatgaatcactcggcggcccgttccagcaggatgctacacctgtttttacatggcagggaaaagagcgtacgtatttccgtgtggaaacgaaggatacgtataccgggaaaggctggattgaaacagacacaggcatgtcgtatcagcttagcaatggaaaagttgaaaatctgtggtttgaccataaggttgcgacagagcgccgcaccgtccgtgtaaaagtcgataagcactacgggtataatcatctgatgtatccgattggtgcggaaaccattcagccaaagcaggctgtctcacttgaaatgaacggcaacacggagcaaatttctccgatcagtgaacaagccggtgaaatcagaaatatgggaaattatactgtaacgtacaattccccggtctataagctggatgaactgagaaaggtaaaagtgagaaaaaacagtgaggagtacacattcagcgatcgctacatgcagcttccagattcactgccagagcgggtgagaacccttgcgatcaaactgactcaggatcacgacaatatgtttgataaggtgaaagcggttgaggactatttagggtcaaatgcgttcacatatgaaacagaaaacgtgaccattccgaagaatgatgaagattatgtcgatcaatttctctttgaaacgaaaatgggttattgtgataacttttcttccgccatggtggtgctcttgcgctcggccgggattccggcccgctgggtaaagggttatacgtccggcgaatacaaagaagcaggaaacaaaaatggcaacatctacgaagtgacaaataacaatgcccattcctgggtagaggtgtatttcccggaacagggctgggttacatttgagccgactaaagggtttacaaatccggctgaatttacttcttctcacacaaaggactccggcaacgataacagcagctcgccgaagaaagcaaaacagaaagaagaggaaaaacagccgcaaaaagaggaaaaacaaaaggaaaagcgggagccagctgtttctaaaaagccgtccgcttcgcatactaatgccggtgcgggcttgtatgcagcgcttgcggttcttgcagtcctcttggtggcagctgtattgctgtatgttttccgctcgttatggattcctgttttcaccgtgaggaaattgaagcggcgcagcgatcagcacgcgttttttgaggcatatgacgcgctgctgaaacaactgaagagaaaagggctgccgaaacgaggcagtgaaacgctgcgtgattatgcaaaacgaatcgatgaaaaatacgacatagaagacatgtcaaagctgacattaagctatgaaagggcgctttacagaaatgaagattcttcagcgctttggaatgattccagagagttatgggaaaatttaattaaaagaagatggtcttgaccgcttatcaacgtgttgttagaattagtgaatattatcggagtctgggagcgagttggcctgactccggcaaacggccttgccaaagagggcggagcgagcttcatatctgtcctcgtttttttctgtgtcaaaaaacttagaggagattaggtgacaaccatgacaaagttagtgaatgaaatgattcttgtccttgatttcggcagtcagtataaccagctgattacacgccgtatccgtgaattcggtgtttacagcgagctgcatccacatacattgacggctgaagaaattaaaaaaatgaatccaaaaggaattattttatccggcggtccaaacagtgtgtatgatgaaaactctttccgctgtgacgagaaaatcttcgagcttgatattcctgttttgggaatttgctacggcatgcagctgatgactcattaccttggcggtaaagttgaagcggcaagccagcgtgaatacggaaaagcaaacatccgcatcgaaggcacacctgatttgttcaaagatcttccaaacgaacaagtggtttggatgagccacggcgatttggttgtagaagttcctgaaggcttcactgttgacgcgacaagccatcactgcccgaactcagcaatgagcaaagcggacaaaaaatggtatggcgttcagttccacccggaagtgcgccactctgaatacggcaatgatcttctgaaaaactttgtattcggtgtttgcgaatgcgaaggcgaatggtcaatggagaactttatcgaaatcgaaatgcaaaaaatccgtgaaacggtcggagacaaacaggttctttgcgcgctaagcggcggcgttgattcctctgttgttgctgttttgattcataaagcgatcggcgaccagctgacttgtatctttgtagaccatggtcttctccgtaaaggcgaagctgagggtgttatgaaaacattcagcgaaggctttaacatgaatgtgattaaagtagacgcaaaagatcgattcttaaacaaactaaaaggcgtttctgatcctgaacaaaaacgcaaaatcatcggtaatgaattcatttacgtgtttgatgatgaagcggacaagctcaaaggcatcgactaccttgcacaaggtacgctttacacagatatcatcgagagcggtacagcaacggcgcaaacgatcaaatctcaccacaatgtcggcggacttcctgaagacatgcagtttgagctgatcgagccgttaaatacgctcttcaaagacgaagtgcgcgcgcttggcacagagctcggcattccggatgaaatcgtatggcgtcagccgttcccaggaccgggactcggaatccgcgttcttggcgaagtaacagaagaaaaacttgaaatcgttcgtgaatcagatgcaatcttgcgtgaagaaattgcaaatcacggcttagagcgtgatatctggcaatacttcactgttcttcctgacatccgcagcgttggtgttatgggtgacgcaagaacatatgattatacaatcggaatccgtgccgttacatcaatagacggcatgacatcagactgggcacgtatcccgtgggatgtgcttgaagtcatttcgacacgtatcgtaaacgaagtgaagcacattaaccgcgtggtgtacgatattacaagtaagccgcctgcgacgattgagtgggaataagtaaataacaatgagaaaaacgtccctttttcaaaaggggcgtttttttgttaactttttgaaaccgtttcgacaatttttgtatctaacaacataggaggtggataaggtgaaggaagacagattgattacaaaggcgagaaaaggaaatgctcgggcctttgaaaagcttatgctggcacatcaggagactttatataaaacagcttatctctatttaagaaataaagaagatgcacttgatgctgtacaggaaacggcttataaagcttttataggtatagaaaaactaaaagagccaaagtactttttaacgtggctcacccgaattcttattaattcaatttttgcaatgaagaaaaagaagggggaattagttccgtttgaaagccatcatgacactggcacggaccaaaggaatattgaagaatatatagacttgcgcaatgcgctggatacacttgatgaacatgttcagttaacaattcagctctattattttcaagattattcgatttcaatgatagctgaacaaacaggaatggcagaaggcacaattaaaacccatttacatagagcgagaaaagcattgaaacaggagctggaaaaggaggatcaaaacaaatggacaaacaccaaatgaagcagatatttgataacattgaagtgccaaagaaagtactcaaaaaggcaatacatcaagctgtcgttcgtgctgaaaatgaaagtaacacaaggcgccgttttaaatgggcacgaactattacaaatggaatggctattgctgctgtggtatgtatattgtatttatcatctggtctttttcttccctctgtaaacaaagcgatggggagcatacccattgtcggacaaatttataaggattttcaagataaagttggtctatcattgtttaaaagcaatttggtcacagctttaaatgaaaaagcagactccaggggaatcactgtttcggtaaacagctcctattacgatgccgggcagcttgtgtataactttactgttgataacctccagtctgatgaaaaagagctcagttataatgtgagtaaagcgagttttaacaataatttttcaatcaactacgattccttaatgctcaaaaaattaaataacaaacaatatgctggtcaattaaggctttatacaaaagggacagaaataaaaaatggggataccgtgccttttgtgattactcatatcaatgaaatacagggaaattggagattcaaactgcctattaccaaaaagaatgcgagttatttagaaagctcaaaagtggtatcagtgcttaacaatcattatcaattttccaatattcaagtggagaacggaaagctcggatctgtccttcaatttacaatcgattatcaaggcgtagcaaagcatgatacggttgaaattaacgaagtcaaagatgatttaggaaacacatatgagatgacagcgtcaaacatccaacttggagaccgcaaaaaagtaaacgagagaacggtaagagcaaaaggacaaacacagttagaatcaccaattaatccaaaggcaaaaaagctaacattaatagcaaatattaaatctgaggcagagggcagtgaaattgtcccgctaaatgcagagatgccgtttcatgtttcagaaacaaaccatcaaaacatagggattgaaatcaataacattaaccaaataggaaagaaagtattggttcattaccatttcactggaattgatacctcaagcgtggacgaaaataaattagtgaatatcggtgaaacgattggccttggtgatataaaaaaaatgcaatcttggcctgatccagtaggtgattatgaagaaggttattatttgaaatggaataaagctgaagtgaagaatatggacacagccgaaatggtatctacttttgaactggatgacgcttatcttgataagctgtctttaaagcattttgagtttaatgaatacggtctgtatattgataaaggcgttttaaatgacctgattcaactaaagccattctcgtttactgtaccagtgcatcaggtgagtcagcctaccgaaaaaaaataatcataagttgaaaagccgtatgttgccatacatacggtttttatcattgttaccaatttagtcaatagacgaataaaccaatttttttaataagtaatgttcgttgtttatattgtcaattcaaaatgaacttggtacaatagacacagaaatcaaataagatgaattcgtataatcgcgggaatatggctcgcaagtctctaccaagctaccgtaaatggcttgactacgtaaacatttctttcgtttgatataaataaaacacgtttatttattcaaactgaaatccgtctgtagtcaagcgtcccaaaattattggggcgttttttatttggcgatttcaggacagaataaatagcaaagagtgaagggagtcaaatagcttgaaaaagtattttcagtttgatgagctgggcaccagctatcgcaatgaaatcattggcggattaacgacttttttatctatggcatatattttgttcgtcaatccgattacgcttgctttggacagcgtgaaagattttccggaggcgctgagaattgaccagggtgcggtctttacggcgacagcgctggcgtctgcagcaggctgtatcttaatgggattaatagcgagatatccgattgccatcgcgccgggtatggggctgaacgcgttttttgcgttttctgttgtccttggtatgggtatttcatggcaggcagctttgtctggtgtttttatttcaggtcttattttcgttgctctttctttaacaggttttcgtgaaaaaatcatcaacgccattccgcctgagctgaaattggcagtcggtgcggggatcggcctgtttattacattcgttggcttacaaggctcaggaatcattactgcaaatccttctacgctcgtcacgatcggaaacattcacagcggtcctgtgctgttaacgattttcggtgtgattgtcacggttattttaatggtgcttcgcgtgaacgcaggcgtgtttatcgggatgctgttaacagcggtagccggcatgattttcggtttggttccggttccgactcaaattatcggcagtgtgccaagccttgcgccgactttcggacaagcgtggattcacctcccggatattttctctgtacaaatgctgatcgttattttaacattcttgtttgtcggattttttgatacagctggtacacttgttgctgtggcaacacaagctggtttaatgaaggaaaacaaattgccgcgtgcgggccgtgcgcttttagctgattcatcttctattgtgatcggtgccgtgcttggtacgtctacaacaacttcttacgtggaatcaagctcaggtgtcgctgcgggtgcccggtcaggatttgccgcaattgtaacagggattctctttttactggctacgtttttctcgccgctcctatcagtcgttacgtcaaatgtaacagcgccggcgcttattattgttggtgcattgatggtggcgccgcttggcaaaatcgcttgggataagttcgaggtggccgttcctgctttccttaccatgatcatgatgccgttaacgtacagcatcgcgactggtattgccatcggatttattttctatccgattacaatggtgtgcaaaggaaaagcaaaagaggttcacccaatcatgtacgggctgtttgtcgtatttatcctgtactttatcttcttaaaataaggaatgaaaaaccagctgcaccggcagctggtttttttgttgcaatagataaaaccatttcatacgatataccgtcatgtagatgtgccgccatgctttacttaaatggaaatgacttgactgttcaggaaggcttcggtaccttatataagtgttttattttcttgctgaatggtattccgccgtatttttttgataggagttgctgacatgacggaagaaagaaaagaaacgtttgaagaagaaattaaccagagtgaaagaatagatgcagatgaagaaccgctatcgagaatgtccagaaaggcgagccggcaaagcaagcagaagcaaaaacaaaaacagaaaccgcgccaggaacgcggtgaatcaactgttaaagtcaagcttgcgtctgtttgggcagccatcaacagatattgcggttttgcgttctcgattttaaaatctccggcgaaaactgtcgtaacggatggtttttctcattataagtacggtctgatttcaatgcttatattcagtatcattttttcaattgggaattggtttcagttaaaggcaagctggaatcggccgctcggtttcggagaacgccatcatgctttctatgacgggtttttagttgttcttgtgtatttgctgatctttttcgcggtaatggtctttgctatatgggctgtctcccgctatatgatgaagcagaaggtgacgttcagagaagcggctgccgtattgggttcattgcttgtaccggtaattgctgtttcaatcctttggctgatctttgcgatcgtaaatattccaatgctgacagtactgtttacggtgctgatcttgttttccatcttttttatcatcgcgctgtatgtacagcgtgtgtaccaggcggcacaagatgcaccaattgattatatctattgtgtatttgcagtggttgcgatagcgctgctgtttacggcagtgacttggccgtttatttctgaatattttacggcgtcgctgattccgctttaatgaaaaaaccggctaatcctagccggtttttttatgtcacactttttacaaatatatctaaaaaacatagttgatttgtaggattaacccgtgtatgatggggaaaatgctgaaaacgtccagcgcaaaaacctttatgtttaaggaggatgatggacatggctgatgtgcttcgccgagcaattaaccaaaagaagcaatttttaaaaaccaaattactgctctcggaattttatcaaggaagaggggaacagcttgcggactacacgctgagtgagcttgagaaagaatacaagtcccttcagaaaatgaaaaaagagatctgacaatagatataaagaggtgagtctgctgaaaagcgggcttttttgttttgattttgaaaaggcgagaaagagggtaaactactactgttcaacgcataaaagcatgtcgaaatattttgcttaagcttacgggcgaagctgattgtaaacggctcatttctctagtagaatatgaatgctttgtgcaagctgaagagtagggggatgaataaaatgatgcaaaccatcttatcaaatgggatagccatggttctcataattctcattattaatattgtctatgtgtcattttttacgataagaatgattttaacgctgaaaggacagcgttatttagcggccggcatcagtacgattgaaatactggtttatgtgacagggctgagtctggtgctcgataacttagatcagattcaaaatgtaatcgcgtacgcgctcggttacggtcttggcgtaattgtcggcatgaaaatagaagaaaaattggcgcttggctatattatggtcaatgtgattacgaaggagctcgatcttgatcttccgaagcagctccgcgaaaaaggctacggcgtgacaaattgggtggcaggcgggcttgaaggcgaccgcacagcccttcagatcctgacgccgagaagatatgaactccagctatatgatacgattaaaacacttgattcaaaagcctttattattgcgtacgaaccaaaaacaatccacggcggcttctgggtcaaagcggtgaagaagaggagaattaaagaataatggcaaagccgaagaagaaaaagtttgaagtgacagagcagcaaacgattgatgcggtgcttcagcaaatgaaagaagaaggatatctgcctgtaaggcgaatggaagagcctatttttatggaaaaaaaggaaaatgggtcaattcagatcgttccgtgcgggaaaaaaatcgtatttgaagggaaattgatctaaaacacgaacattagtagaaagaatttttgtatcgttcgataatatcgttgacattatccatgtccgttgttaagataaacatgaaatcaaaacacgacctcatataatcttgggaatatggcccataagtttctacccggcaaccgtaaattgccggactatgcaggaaagtgatcgataaaactgacatggatatatcgcagaagcgaacgactgacgatacatgtaccatgcccggtttgtattgcttcctcataagtgcaatgcagagcgggtattttttattttctgaaaacaaaagcattagaaggtggggaacagaatgcagccgctagtaggaatcatcatgggaagcacttccgattgggagacaatgaaacacgcatgcgacatacttgacgaactcaatgttccgtacgaaaaaaaggtcgtttccgctcaccggacgcctgatttcatgtttgaatatgctgaaactgctagagaaagaggcatcaaggtgattattgccggtgccggaggagcggcgcatctgccagggatgacggctgcgaaaacaacactgccagtcattggagttccggttcagtctaaggcgctgaacggaatggattcacttctttccatcgtccaaatgcctggaggcgtgcctgttgcgacaacatccatcggcaaagcgggtgctgtgaacgcaggcctgttagcggcgcaaattttgtcagcatttgacgaagaccttgcccgtaagctggatgagagaagagaaaatacaaaacagacagtgttagaaagcagtgatcggcttgtctaaacaaatcatctatccgggagctgtaatcggcattatcggcggcggccagcttgggaaaatgatggctgtgtccgccaaacaaatggggtataaagtcgcggtcgttgatccggtgaaagattcgccgtgcgggcaggttgcggatatcgaaattaccgctcattataatgaccgtgaagcgattcgaaaattggctgaaatcagcgatatcatcacatatgagtttgaaaacatcgactatgatgcgctgcattggctgaaagatcatgcgtatctcccgcaaggaagtgagctgctgctcattacccaaaaccgtgaaacagagaaaaaagcaattcaatccgcgggctgtgaagtcgcaccgtacagcatcgtcaaaacaaagaatgaattgaaacaggcggtacaggagctcgggttacccgcagttctgaagacatgccgcggcgggtacgacggcaaaggccaatttgtgataaaagaagaggcgcaaatggagcaggcagccggtctgttagaacacggaacttgcattcttgaaagctgggtttcttttgaaatggaactgtcggtgatcgtcgtcagatcggtaaacggtgaaatttcaacatttccgacagctgaaaacattcaccacaacaatattcttttccaaagcatcgtgcccgcacgggtagagaaagggattcagcagaaggctgctgatctcgcagttaagcttgcagatgagcttaaccttgtcggaccgcttgctgttgagatgttcctgacagaggacggagagcttttggtcaatgaactggcgccaagaccgcacaattctgggcattatacgctggacctttgcgagacgagccagtttgagcagcatatcagagcggtatgcgggcttccgcttgggaagacagatttgctgaagccgggcatgatggtgaatcttctcggcgatgaagtgaagcttgtggaggaagacccggagcttttaaaagaggcaaagctatatatatacgggaaacatgaaatcaaaaaaggccgcaaaatggggcatattacatttatgaagcagcctgaagacgaatggattcaggagatcacaaataaatggatgaatagagacggaggacaagcagaatgatcgaacgttattcaagacctgaaatgtccgcgatttggacggatgaaaacagatttcaagcatggctggaggtagagattcttgcctgtgaagcgtgggcggagcttggcgtcattccgaaagaagatgtaaagattatgcgcgaaaacgcgtcatttgacatcaaccgcattttagaaattgaaaaggacacgcgccatgacgttgtcgcttttacacgcgctgtttccgaatcattgggcgaagaaagaaagtgggtgcactacggattaacgtcaactgacgttgttgatacggctctttcctacttattaaaacaggcaaacgatattttgctcaaggatcttgagagatttgttgacattataaaagaaaaagcgaaagaacataaatacacagtcatgatggggcgcacgcacggcgtacatgctgagcctacaactttcggcttaaaacttgcgctttggcatgaagaaatgaaacgtaatcttgagcgcttcaaacaagcgaaagcaggcatcgaggttggaaagatttctggcgctgtcggcacatatgcgaacattgatccatttgttgaacaatatgtctgtgagaagctcggattgaaagcagcaccgatttcaactcaaacccttcaacgtgaccgccatgctgactatatggcaacacttgctttgatcgcgacaagcattgagaaattcgctgtggaaatccgcggactgcaaaagagtgaaacacgtgaagtagaggaatttttcgcgaaagggcaaaagggttcatctgcaatgccgcataaacgaaatccgattggctctgaaaacatgacaggcatggcgcgcgtgatccgcggctacatgatgacagcttacgaaaatgttccattatggcatgagcgcgatatttctcattcttcagcagaacgaattattcttccggatgcgacaattgcgctgaactacatgctgaaccgcttctccaacatcgtgaagaacttaacggtcttcccggaaaacatgaagcgcaacatggaccgcactctcggccttatctattctcagcgtgtgctgcttgctttgattgacacaggccttacacgtgaagaagcctatgatactgttcagccgaaagcaatggaagcgtgggaaaaacaagtgccgttccgcgagcttgttgaagcggaagagaaaatcacgtcacgtctttctccagaaaaaattgctgactgctttgattacaattaccatctgaaaaatgttgatctgatctttgaacgtttaggtttagcatagaagaagcttttagcggcttcttctaagccgccgatgtttgaaaattcccaacattcgggttaggaggccttccgtgaatattgtgaagaatgaacttttatacgaaggaaaagcaaaaaagatctacaaaaccgatgacgaaaacacgctgtatgtcgtgtataaagactccgccactgcctttaacggcgagaaaaaagcagaaatcagcggaaaaggacgcttaaataacgagatttcaagcttgattttcaaacatcttcatacaaagggcattaacaatcactttatcgagcgcatttcggaaacggaacagctcattaaaaaggtaacgattgtgccgcttgaagtcgtggtcagaaatgttgtggcaggaagcatgtccaaacgtctcggcattccagaaggcacggagcttgagcagccgattatcgagttttactacaaggatgacgcgctgggtgatccgctcatcacagaagatcatatttggcttttgaaagcggcgactcctgagcaggtagaaaccattaagtccattacaaaaacagtaaatgaagagcttcaaagcattttcgacgattgtcatgtcagattaatagatttcaagcttgaattcggtttagatgcagaagggcaagtgcttttggcggatgaaatttctcctgacacatgccgcttgtgggataaagacacgaacgaaaagctggataaagatttattcagacgcaatctgggaagcttaaccgacgcatacgaagagattttcaaaagactgggaggcattcatcatgtataaagtaaaagtttatgtcagcttaaaagaaagtgtactagatccacaagggagcgctgtccagcatgccttgcacagtatgacttacaacgaagttcaagatgtgcgcatcgggaaatacatggagcttaccattgaaaaatctgaccgtgatcttgacgtgctagtgaaagaaatgtgcgaaaaacttcttgcgaacacagtgattgaagattacagatatgaggttgaggaggtagtcgcacagtgaaatttgcggtgattgtgttacccggctccaactgtgatatcgatatgtatcatgctgtaaaggatgagctcggccatgaagtggaatacgtctggcatgaggaaacaagtcttgacggcttcgacggtgtgttaattccgggagggttttcttacggcgattacttaagatgcggcgccatcgcccgatttgcgaatattatgccagctgtcaaacaagcagcggctgaaggaaaacctgttcttggcgtctgcaacggattccagattttacaggagcttgggctgctgccaggcgcaatgagacgcaacaaagatctgaagttcatttgtcgtccggttgaattaattgttcagaacgacgaaacattattcacagcttcctacgaaaagggagaatcgattacaatcccggttgcccacggtgaaggaaatttctattgtgatgacgagacgcttgcttcattaaaggaaaacaatcaaattgctttcacatacggctctaatattaatggaagtgtcagcgacattgccggtgtcgtgaatgagaaaggcaatgtattaggcatgatgcctcaccctgagcgcgcggtcgatgaactgcttggaagcgccgacggtcttaaattgttccagtctatcgtgaaaaattggagggaaactcatgtcactactgcttgaaccaagtaaagaacaaataaaagaagagaaactgtatcagcaaatgggtgtcagtgatgatgagtttgcattgatagaatccattcttggaagattgccgaactacacagaaatcggaattttttctgtcatgtggtctgagcattgcagctataaaaactcaaagccgattctgcgtaaattcccgacaagcggcgagcgtgtgctgcaggggccgggggaaggcgccggaatcgttgatatcggtgataaccaagcggttgtgttcaaaattgaatcacataaccacccatcagctctcgagccttaccaaggcgctgcgactggcgtaggcggaattatccgtgacgtattttcaatgggtgcccgtccaatcgctgtattgaactctcttcgatttggtgaactgacttcaccccgcgtgaagtacttgtttgaagaagtagtagcgggtatcgccggatacggcaactgtatcggcatcccgacagtcggcggagaggtacaatttgacagcagctatgaaggaaatccgcttgtcaatgccatgtgcgtcggtttaatcaatcatgaagacatcaaaaaaggccaggcgaagggtgtcggcaataccgtaatgtacgtaggagcgaaaaccgggcgtgacggaatccacggcgctacgtttgcttctgaagagatgtcagactcatctgaagaaaagcgttctgctgtccaagtcggcgatccgtttatggagaagcttttgcttgaagcgtgtctggaagtcatccaatgcgacgccttagtcggcattcaggatatgggagctgccggtttaacaagctcaagtgcagaaatggcaagtaaagccggttctggtattgaaatgaaccttgacctgattcctcagcgcgaaacaggcatgagcgcgtatgaaatgatgctttctgaatcacaggaacggatgcttttggttattgagcgcggacgtgagcaggaaatcatcgatatttttgacaagtacgatcttgaagcggtttctgtcggacgtgtgacagatgataaaatgcttcgcctgacacacaaaggagaggttgtgtgcgagctgcctgttgatgccttggcagaagaagcaccggtttaccataagccttctcaagagcctgcttactatcgcgagtttttggaaacggacgttccggctccgcaaattgaagatgcgaatgaaacgctgaaggcccttcttcagcagccgacgatcgcgagtaaagagtgggtgtatgatcagtatgactacatggtgcgcacgaatacagttgtcgctcctgggtctgatgctggtgttctcagaatccgcggaacgaaaaaggcgctggcgatgacgacagactgtaacgcgcgttatctctatcttgatcctgaagtcggagggaaaattgctgtcgctgaagcagcgcgcaacatcatttgctcaggcgcagaaccgcttgcggtcacagataaccttaacttcggaaacccggagaagccggaaatcttctggcagatcgaaaaagcggcagacggcataagcgaagcgtgcaatgttctcagcacaccggttatcggcggtaacgtatcgctttataacgaatcaaacggcacggcgatctatccgacaccagttatcggcatggtcggcctaattgaagatacagcgcacattacaacacagcatttcaaacaagcaggagatctcgtatacgtgatcggcgaaacaaaaccagagtttgcgggaagcgagctgcaaaaaatgacagaaggccgtatttacggcaaagcgccgcaaatcgatcttgatgtagagctgtctcgtcaaaaagcactgcttgacgcgattaaaaaaggcttcgttcaatctgcgcatgatgtgtctgaaggcggcttaggcgtagcgattgcggaaagtgtcatgacgacggaaaaccttggcgctaatgtgactgtagaagggggagcggcattattattctctgaatctcaatcccgcttcgtcgtttcagtgaaaaaagaacaccaagaagcgtttgaagcaactgtcaaagatgcggttcatattggtgaggtaacagctgacggaattctggcgattcaaaaccaagacggacaacaaatgattcatgcgcaaacgaaagagcttgaacgcgtatggaaaggagctatcccatgcttgctgaaatcaaaggcttaaatgaagaatgcggcgtttttgggatttggggacatgaagaagccccgcagatcacgtattacggtctccacagccttcagcaccgaggacaggagggtgctggcatcgtagcgactgacggtgaaaagctgacggctcacaaaggccaagggctgatcactgaagtatttcaaaacggcgaactcagcaaagtaaagggaaaaggcgctatcgggcacgttcggtacgcaacggctggaggcggcggatacgaaaatgttcagccgctcctcttccgttcccaaaacaacggcagcctggcgcttgctcataacggaaatcttgtcaatgccactcagctgaagcagcagcttgaaaatcaagggagcatctttcaaacctcttcggatacagaggttttggctcacctgatcaaaagaagcggacacttcacgctgaaggatcaaattaaaaactcgctttctatgctgaaaggcgcctacgcgttcctgatcatgaccgaaacagaaatgattgtcgcacttgatccaaacgggctgagaccgctatccatcggcatgatgggcgacgcttatgtggtcgcatcagaaacatgcgcatttgacgtcgtcggcgcaacgtaccttcgcgaggtagagccgggagaaatgctgatcattaatgatgaaggcatgaaatcagagcgtttttccatgaatatcaaccgttccatttgcagcatggagtacatttatttctccagaccagacagcaatattgacggtattaacgtacacagtgcccgtaaaaaccttggaaaaatgctggctcaggaatccgcagttgaagctgacgtcgtaaccggggttccggattccagtatttcagcggcgatcggctatgcagaggcaacaggcattccgtatgagctcggtttaatcaaaaaccgctatgtcggcagaacgtttattcagccgtcccaggctctgcgtgagcaaggcgtcagaatgaagctgtctgcggtgcgcggggttgtagaaggcaaacgcgtcgtgatggtggatgactctatcgtacgcggaacaactagccgccggattgtcacgatgcttagagaagcgggtgcgacagaggtgcatgtgaaaatcagttcaccgccgatcgctcatccgtgcttttacggcattgatacttccacacatgaagaattaatcgcgtcttcgcattctgttgaagaaatccgtcaggaaatcggagccgataccctctcatttttgagtgtggaagggctgctgaaaggcatcggcagaaaatacgatgactcgaattgcggacagtgtctcgcttgctttacaggaaaatatccgactgaaatttaccaggatacagtgcttcctcacgtaaaagaagcagtattaaccaaataaaacttgaaaaatgacataaaggcagcgcagttcggctgcctttctctttctgccctcattcggggagatattttgaaaagcgccttaaaggagtgaataggatgtctgaagcatataaaaacgcaggagttgacatcgaagccggatatgaagctgtaaaacgaatgaaaaaacacgtggagcgcacgaaacggcttggcgttatgggcagccttggcggttttggcggcatgtttgacctgtctgagctttcttatcaaaaaccagttctcatttcgggaacggacggtgtcggcacaaaattaaagctcgctttttccatggataagcatgacacgattggcgtggacgctgttgcaatgtgtgtcaatgacgtgctggcacaaggtgcagagccgctgtttttcctcgattatttagcggttggcaaagcggacccagtgaaaattgaacagattgtacaaggtgttgcggaaggctgtgagcagtcaggttcagccttagtcggcggtgaaacggctgaaatgccggggctctatacagctgatgaatacgatattgccggtttctcagtcggagtggcagaaaaggacgaaatcgtgactggagaaaacattgaagagggccatctgttgatcggtctcagctccagcggccttcacagcaacggcttttcccttgtcagaaaagtgcttctggatgatgcggagctggacctcgatacaacatatgagccgtttgaacgcccgcttggcgaggaattgcttgaaccgacaaggatttacgtgaagcctgtgcttgccgcggtcaaaagcggaaaaatcgacggcatggcgcacgtgacaggcggaggatttattgaaaatattccgcgtatgcttccggaaggcttaagtgcggaaattgatcatggctcatggccgatcccgccaattttttctttcttgcaagagtacggcaagctaaaggaagaagacatgttcaacgtctttaatatgggtatcggttttgttttggcagtcaaagaagagcatctgacagatgtgatcggaacgcttgaaagccatggcgaaaaagcctatttaattgggcgtgtgaaaaaaggtgaaggcgtcacattcggcggtgcggcactttcatgaaaaagtttgcggtatttgcatcaggaaacggttcaaacttcgaagccatcgtcacgcgtttgaaggaggagaactgggatgcgtcagcagcgctcctcgtttgcgacaaaccgcaggcgaaagtcatcgaacgggcggaagcattccacattccatccttcgcatttgagccgaagtcttatgaaaacaaggctgcatttgaacaagccatcattgaacagcttcgtcttcacgaggttgaattgattgttcttgccggctatatgaggctgatcggtgatacgctccttcaagcatatggaggaaaaatcattaacattcacccgtcgcttcttccggcgtttcctggaatcgacgcagtcggacaggcgttccgggcgggtgtaaaggtggccggaatcaccgtgcattatgtcgatgaaggaatggatacaggtccgatcatcgctcaaaaggctatcgaaattgatgagcatgatacattggaaacaatcgaacagcggattcacaagcttgagcataaatggtatccgagtgtgattaaacagctattaggattaaataacagaggtgaaaaggcatgaccattaaacgtgcattaatcagtgtttcagataaaacaaatctcgttcctttcgtaaaagaactgacagagcttggcgttgaagtcatctccacaggcggaacgaaaaagcttcttcaagaaaacggtgtggatgtgatcggaatttctgaagtgacaggctttcctgaaattatggacggccggttaaaaaccctacacccgaatattcacggcggccttctggcggttcgcggcaatgaagagcatatggcgcagatcaatgaacacgggattcagccgattgacctcgttgtcgtcaacctctatccatttaaagaaacgatttctaaggaagacgtcacatatgaagaagcgatcgaaaatatcgacatcggcggacctggcatgctgcgtgcggcatcaaagaaccatcaggatgtcacggttatcgtcgatccggccgattacagcccagtgctgaatcaaatcaaagaagaaggcagcgtatctcttcagaaaaaacgcgagctcgcggcaaaggtattccgtcatactgcggcatatgatgcactgatcgctgactatctgacaaatgttgtcggtgaaaaagaaccagagcaattcactgtgacatttgagaaaaaacaatcgcttcgctatggagaaaacccgcatcaggaagcaactttctatcaaacagctcttcctgtcaaaggctccattgcgcaagcagaacagcttcacggaaaagagctttcttacaacaacattaaagacgcggatgctgcagttcaaatcgttcgtgaattcactgaaccggctgctgttgctgtgaagcatatgaacccgtgcggcgtgggaacaggaaaaacgatcgcagaagcgtttgacagagcgtttgaagcggataaaacatctatcttcggcggcattatcgcgctgaaccgtgaagtggacaaggcaactgccgaagcgcttcacaacattttcttagaaatcatcattgcgccttcattcagccaagaagcgctcgacgtcctgactgcgaagaaaaatctccgtctgctgacgcttgacgtatccgccgctgttcaaaaggaaaaacagctgacatccgttcaaggcgggctgctgattcaagatttagatatgcacggcttcgatgatgctgagattagcattccgacaaaaagagagccgaacgagcaagagtgggaagacttgaagcttgcttggaaagtcgtgaagcatgtgaaatcaaatgcgattgttctcgcgaaggacaacatgacagtcggcgtgggagcaggccaaatgaaccgcgtcggatcggcaaaaatcgcaatcgagcaagcaggggaaaaagcgaagggcagcgcgctcggttcggatgcatatttcccaatgccagatactgtcgaagaagcggcaaaagcgggcgttacagccatcattcagccaggcggatcgatccgagatgaggattccatcaaaaaagcggatgaatacggcattgccatggtattcaccggcatcagacacttcaaacattaaggggatgaaaacgacgtgaatgtattaattatcggtaaaggcggaagagaacatacgctggcgtggaaggcagcgcaaagcagcctcgtcgagaatgtatttgcagctcctggaaatgacggcatggaagcttccgcacagcttgtaaacattgaggaaagcgaccacgcagggcttgtctcgtttgcaaaagaaaaccaggtcggcctaaccattgtcggccctgaggttcctttgattgaaggtctggtggatgaatttgaaaaagcgggtctgcgcgtgttcggcccgtcaaaagccgcggcgatcatcgaaggaagcaaacagttcgctaaggatttaatgaagaaatacgacattccgaccgcagaatacgacacgtttacatcctttgatgaggcgaaggcatatgtgcaggaaaaaggtgctccgattgtgataaaagcagatggacttgcagctggaaaaggcgttactgtggctatgacagaggaagaagcaattgcatgtctgcatgactttcttgaagatgaaaagttcggtgatgcgagcgcgtccgttgtcattgaagaatatctttctggtgaagaattttctctgatggcctttgtcaaaggggaaaaggtgtatccgatggtgattgcccaggatcacaagcgtgcgtttgacggagacaaaggtccgaatacaggcggaatgggcgcttactctccagttccgcaaatttcggaagaaacggttcgccatgctgtagaaaccatcgtgaagccggccgcaaaagcaatggtacaagaaggccgttccttcactggcgttttgtacgctggattgatgcttactgaaaacggctcgaaggtcattgaatttaatgcccgtttcggcgatccggaaacacaggtcgtgcttccgcgcatggaatctgatctggtacaggtgcttcttgatcttttagatgataaggaagttgacttaagatggaaggataccgcggcagtgagtgttgtgcttgcatcagaagggtatccggaaagctatgcaaaaggcacgccgatcggcagccttgcagcagaaactgagcaggtcgtggtcttccatgccggaacgaaagcagaagatggagagttcgttacaaacggggggcgcgtcgccaatgtgacggcttttgatgaaacgtttgaagcggctagagaccgagtgtacaaagcggttgatgaaatattcaaaccgggactctttttcagaaaagacattggggcacgcgctttaaaggctgcccaaaaataagtgaggaaaacccgcagaatagctgcgggttttttgttatcaaaaagcgggatggcagctggaagaagaaaggacaacgagcgtggttggttttccatgggccatcgaggcgtcaataaaatcctcaagcgtatgtaccgattcagtcacgacctttgtcacatagctgtacatccctgtgatgcggtggttttctgctacatcagggtgcgcttttgcaaaggcggcgtagtgcttgcagcttttcggctccatgagaatgaaagcggtgacatgcttgtttagtttttcataacagatattcgcgctgtacccggtaatcactcctttgtcttcaagcttcctgacacgctccgccgcgcttggcgaactgagtccgacaagctttcccagctcaaccatcgttaatctgccgtttcgctgcaaatgcgagagaatctgaaggtctgtatcgtccatttgtccggctcctttacatatttaggcgaatgaatgaaaattcctttgatcgtaaggtaatgctgttgatttaacttcattgtagcatatggatgccgtcttattttttctataataaagccatcaatcagagaggaggcatcatgttgccagaattacagcgctctattacttggatacaagggacggcgttaacgattggggcggttttaggatgcgggatattaatcctgccgtctgtcactgcggatacggccggtccggcttctttatttgtctgggtattcatgtcttttttatcttttcttctcgtcggcacgctggcacggcttgtgaaaattgcgcccagcgcgggaggaatcactgcttatgtgcagctggcctttcagaaaaaagccggggctattttgggctggatcatgttaggttccgttccgattggcgttcccatcatcgctttgactggcgcgcattacgtcagttacatcacagaggcggccgattggcagattacattgattgctggttgcatgctggctatatctattttgcttcatatgagaggcattcaactatcagcaaacatcagtacaatcgttatttgtgtcatcgtatttctgcttgtcacttctattgctgtgtcattgccacacgtcacgatagcagaattcaagccgtttcttccgcatggctggtctgccgctggatctgtttcagttatgatttttttctcttttgtaggctgggaaatgattaccccgttggctgaggaatttcatcgccctgaaaaagatgtcccgctcagcttgtttttggcagcgtcttgtgtggcagggctgtatatcatgctgtcatttgtgacggtggggactcattcatatggagagaatggagaaattgcatcgcttgccatgctcatttcaaaaggagcaggggaaagcggtgtatacgtcacggtatgtttagcgctgtttattacattcgctaccatccatgccaatattgctggtttttcaagaatggtgtacgcattggcgagagaggggcacatacccgtattttttggaaaactcagtgcgacaaaacgtacgcctatccgtgttttgacagcgatggccgcagtgtttggcttagtgcttgcggcgcatggtctgtttcaaatcgatttgacgactctgttgaaagggccgagcgcggcttttatcgcatcttacatatgtacaatggcggcagcactgaaactgctgggcaggagagatataggctggtggatggcgctcggggcatttgcggcgtgcgcggtgatttattcattcagcggctgggcactgctttatccggcagtgctggcagctgcaggatatttctatatgaaaacaaaggatgggcataaaaaaaagcttgatcacgttttgtgattaagcttttccatttatccgttttgatgctcgttatttccagaatcactgtgttgaaacatgtaggtcacaggacagaagcgcaagattcccgaacccgctttcatggcccccataaagatgtaaaagagatgcattctgcaccaaggttttttcgtaaactttgcactggcggctgacataatcgtcaatccgcaggcgattctgaacacggcattgatgagactgatgtttggcttcaaggaaatccgctccttttacttaaaaaagttttttaaccgaaccttcaaaaatttgtaacgtttttatcgtgcgtgatgaggaaggatgtgataccatgagtctaatacatgtaaaggagagtatgtgaatgtccgaacgcacctttaactggaaaaacaaagacatcagggcacaggttgatgttgtagactcaaagctgcttccaacgctccttttacggaatgctctcgtcttaaatccatatgtaaaacaatggctgaaaaaaaacatttggatttatcaggaccgcattgtttatgtgggtcatgaacttccgaatagagccgaagaaattcatacgattgattgtgaaggaaaatacattgtgccaggttatattgaaccgcacgcacatccttttcaaatatataatccccaaacactggcggaatatgtgtctcaatacggaacaacaacattcgtgaatgataacttatttttgcttttgcaaagcggaaaaaagaaagcgcttacgattttgaatgaactcaaaaagcagcctgtccagtatttttggtggtcacgctatgacctccagaccgaggttctgaacgaggaccacgtccttccatttgacgtcagaaaacagtggattgaacatccggatgtgattcaaggcggagaaatgaccggatggcctcgcctggtagatggtgatgatttaatgctccactgcatgcaagctacaaagaaacagagaaaacgcattgaagggcattttcccggcgcttctgataaaacgcttacaaaaatgaagctgttcggtgcagattgtgatcatgaagcgatgtcaggtgatgaagtgatgagaaggctggaactgggctattatgtttcccttcggaactcttccattcgccctgatgtaagaaaaatcttgcaagagctgcatgagaagggcttccgctattatgaccacttcttttacacgacagatggcgcaaccccgaatttctataaaggcggcatgacaaacgagctgattcgcatcgcgttagaagaaggcgtacctgcaatcgacgcctacaatatggcatcatttaatatcgcaaagtattaccaaatggatgattatttaggagttgtcggaccgggtagactggcatcgctcaacatactggaagatccgttaaatccgaatcccgtgactgttctgtcaaaagggactattctgcgtgaagacggctgtgatttgaaggcgtttacaaaggcggactggcacaaaggtggtcttgtcccgcttgagctttcatatgatatgacgatggatgacttgcagttttctatgccgatgggcgtgaaaatgcggaatgcggttattatggagccgtatatgattgagattgacaattcgatggaacagctctcgtttgaccatgatgaaagttatttgacgatgctcgacagacacgggaaatggcgcgtcaatacgatgataaaagggtttgcctcaagcgtgcagggatttgtaagctcctttacgacgacgggcgacattgtcgcgattggaaaaaataaagcggatatgctgctcgctttcgcccggatgaaagaaatcggaggaggaattgttttagcggagaacggaaacattttgcatgaaatcccgcttgccctgtgcggctgcgcctcttcggaagcgtatgaagaagtgcttgagaaggaacaaaagctgagagatcttttgactgaaagaggctatgagttttgcgatcctatctatacgctgctctttttgcaaagtacgcaccttccgtatatacgcattacgccaagaggaatcttcgacgtcatgaaaaaaactgtactctttccatcgataatgcgttaaaatataaaagagcagggagccgacatatgaaaaaatggatgacagtttgcgcgctgtgtttcgtgttttttctgctggtatcctgccagcagaaggatgctgtcccggatactgcaaagaagctgaaagctcctttaacggggctaaagactgaacagaaagtgactgaacgccgccctgttgctgttgtggtgaacaatcacccgaaggcgaggccgcagtcgggtctgtctaaagccgacattgtcatagaagcgctagccgaagggcaaatcacaagatttctggccattttccaaagccagatgcctgaaactgtcggacctgtgcggagcgcgcgggaatatttcgtcactctcagcaatggctttgacagcatatttgtccatcacggctggagtcccggcgccaaaaagcagctggaatccggagctgccgattatatgaacggattggattttgacggaagcttattttggagagctgatttcagcaaaccgccccacaattcctatacgtcttatgattacataaaaaaggcggcagaacaaaagggttataagctgaagcaggaaacaaatccgctgctgtttcaaacatcagatgcaaaacctgcaaatgaatcttacaatgttcgggtagattatggaacaaaaaacgttacaaatcttgtcgaatacaactatgataaaaaagctgaatcttatacaagaagctctgatggtgtcataacgacagaccgggaaaccggaaagccggttgcaatgcaaaatattttcattgttgaagccagccatcatattattgatcaagatggaaggcgggacatcgacttggtatcaggaggaaaaggtctgttgtttcagcacggaaacgtcattgaaacagactggaaacaagtgaatggcagaattgtgccgataaaagacggcaagtggcttccgtttgtgccaggaaagacttggatcaatatcgtacctgatcttgatgcggcttccattagtaaaggagaaggtgtgtaacgatgcaaatcgataaattacgcggcaaagagctggaccagttatttaactcgatcttatcgctgaaagacctggaggaatgttaccgattcttcgatgatctatgcacaattaacgaaattcaatcgctggctcagcgccttgaagtggcgcgcatgcttcgcgaaggaaacacgtatcataagattgaaacagaaacaggcgcttccacggctacgatttcccgtgtgaaacgctgcttaaattacgggaatgacgcttatgaaatggcgcttgaccgtgtgaaggagacggaaactgagtcttcttcaaaataataaacaaccgccctgccgttcggcaagggcggtttctttatgaaacaaattgatggatcaggttgtcgatatcgatgatactgccatcctctttccgatagacaacatgctccttggaaaagtgaatcggcgaattgatccctgctgcggctgcaaggttaaatagtccctcgcgcaatgaaataacgtagttgcagacacgatgctgtttttcctcaacgctcagtgctttttgcaatttcggatctgtcgtcgccacacctgccggacatttgttggtgtggcagacgagagcgcggatgcagccaacggaaaacatcatgccgcgtgcgatgttgacaaagtcagcgccgagggctaaggcgaccgcgattttatcaggagtcaggagctttccggaagcaaagattttcagctggctgcgcaagccgtactgtttaagaagcgtgtcaacaataggcagcgctgtcataatcggaaggccgactgtatccgcgagctcgtaaaaggaagctccggtaccgccttcacttccatcgatcgtgataaaatccggatgttttccgcttttctgcatatgagagaaaagctcatgcaattcttcaggatgccctgcgaccagtttgatgccgactggcttttgtccgacatctctaagtttttcaataaagtcgagcatttcaggagggtttgagaattcataaaagcggttcgggctgtcaatcgactttccaggttcgacattccgaatgtctgccacttcctctgatactttggcgccatccacatggccgccccgggttttcgctccttgtgccagctttagctcaaacgctttaatctggtcaatcctgctttttcttttaaattcctcccacgaaaattccccgtttcttttgcgcacgccgaataggcccggtccgatttggcaaatgatatcggcgccgccctttaagtgatattcagacaatcccccttcacctgtattcatccaggtgccgcctgcctgatggagcccttttgagagcgccgtaacagcccgttctccaagagaaccgtagctcatggcagactggccgactaagcccttcacataaaatggcttctcgcatgtacgctcgccaatcacctgtacatcatcaggatggagaaaatacgggtctgccttgatatgttcggcatgctccttgcgtttgaacagattgtcagcatccattttatagatttgggtttcaattttgggcgtttgatttacgtgcatttcttccctttgttttggaaacatagcgttacggatataatagccaggtttatcaaaatctcttacagatccaaagcccatcattctgcttttgtatttgccggagatgacggtttgctcatattcctttcgtgaaaaaggctgctcctcattgtcattgctgtataaatactgtctgagctccggcccgattttttcaaggatataccgaaaccttccgatgacgggatagttgcgaagaattgagtgctcctgctgtttttcatcctttatgtagatccaggcaaacaagacgatcgggatagcgatgatccctatgataaatgcgatgagtgctattatgatggtttccatctctcagcctccctttttatgtaaccatttccacagttgaacactttccaaacaatagcagaaggaatctggtgaaaaatgtgtgcttctgccgatacaggactcagagagcaggtactgccatatgctctttttttatgaaaatagaatcaaaacacctttttcagtgaataacgagattaacggctttttccgtttttccgcgctatgtgaatttgttataatgtttaaatggtaacaaacgaatggaggaacgtatgacgtgtacgatgtaacggagtggaagcatgtctttaaactcgatccaaataaagatttgcctgacgaacagctggagattctttgcgaatcaggaacggatgcggtcattatcggaggcagtgatggtgtaacagaggataatgtcctgcggatgatgtctaaggtaagacggtttttggtgccgtgtgtccttgaggtatcagcgattgaagcgatcgttcccggctttgacttatattttattccgagtgtattaaacagcaaaaacgcggattggattgtcggaatgcaccagaaagccatgaaggaatacggagaactgatgtctatggaagaaatcgtggcggagggctactgcatcgcaaatccagattgcaaagccgcggcactgactgaagcggacgccgatctgaatatggatgatattgtcgcctatgcgcgtgtgtcggagctgctgcaactgccgattttttatttagaatacagcggcatgcttggagacatagaagctgtcaagaaaacgaaggctgtattggaaacgtcaaccttgttttatgggggcggcatcaaggatgcggaaacggccaagcagtacgcagagcatgcggacgtgatcgttgtaggcaatgctgtgtatgaagattttgacagggctttgaaaacagtagcggctgtgaaaggcgagtagtaaattgtacggatttggtttatgatagaacatatgttttgtataggcgggtgaacaaattttgaattatattagcaatcaattactaagcggtttaaaccccgttcagcaggaagcagtcaaaacaacggacgggcctcttttgctgatggcgggagcgggaagcggaaagacgcgtgtcctgacccatagaattgcttatttaatggcggaaaagcatgtggcgccgtggaacattctggcgatcacatttacaaataaagcggcacgcgaaatgaaagaacgtgtggaaagcatcctcggacccggcgcggacgatatctggatttccacattccacagcatgtgcgtgcggatcttgcgcagagatatcgaccggattgggatcaaccgaaatttctccatccttgatacggctgaccagctttcagtgatcaaggggattttgaaggagcgcaatcttgatccgaagaagtttgacccgagaagcatcctcggtacgatcagcagtgcgaaaaacgaattgaccgaaccggaggaattctctaaagttgctggcggctactacgatcaggtggtcagcgatgtatatgctgattatcagaagaagctattgaaaaaccagtcgctcgatttcgacgatttgattatgacgacgattaaactgtttgaccgagtgccggaagtacttgaattttatcagcgcaaattccaatacatccatgttgatgagtatcaggatacgaacagggcgcaatacatgcttgttaagcagcttgccgagcgtttccagaacctttgcgttgtgggggattctgatcagtcaatctacagatggcgcggcgcggatatcaccaacatcctttcatttgaaaaagattatccgaatgcaagcgtgattttgctagaacaaaactatcgttcaacgaaacggattttgcgcgcggcaaacgaggtcattaaaaacaactctaaccgcaaaccgaaaaatttgtggacggaaaacgatgaaggcatcaaaatttcctattatcgcggtgataatgaattcggagaaggacagtttgtggccggcaaaattcatcagcttcacagctcaggcaagcggaaactgtctgatatcgccatattataccggacaaacgcgcagtcccgtgtgattgaggaaacgcttctcaaagcgggcttgaactataacattgtcggcggcacaaagttctatgacagaaaagaaattaaagacattcttgcgtacctgcgcctcgtatccaatccggatgacgatatcagtttcacgcgcattgtcaatgtgccgaagcgcggagtcggcgcgacatcacttgaaaaaatcgcttcgtatgcggccataaacggcttgtcatttttccaagcgattcagcaggttgattttatcggcgtcagtgccaaagcggcaaacgcgcttgacagctttagacagatgattgaaaacctgaccaatatgcaggattacttatccattacagagctgacagaagaaattcttgataagacggaatacagagaaatgctgaaggctgagaaatcgatcgaagcccaaagccgtttagaaaatatcgacgagttcctgtctgttacgaaaaactttgaacagaaaagtgaagacaagacactcgttgcgttcctgacagacttggcgttgatcgcagatattgatcagctcgatcagcaggaggaagagtcaggcggcaaggatgcgatcaccctgatgacactgcacgccgcgaaaggactggagtttccggttgttttcttgatggggcttgaagaaggcgtcttcccgcatagccgttcactcatggaggaagcggaaatggaagaagaacgccgccttgcgtacgttgggattacaagggcggaacaggagctttatctgaccaatgctaaaatgcgcaccttgtttggccggacaaatatgaacccggaatctcgcttcattgctgaaataccggatgatttattggaaaacctaaatgagaaaaaagaaacgagagcgacgtctgcgagaaaaatgcagccgagacgcggccctgtttcacgcccggtatcctacgccagcaaaacaggcggcgacaccttaaactgggcagtcggagataaggcgggccataaaaaatggggaacaggaactgtcgtcagcgtgaaaggcgaaggagaagggacggagctcgatattgcctttccgagccctgtcggcgtgaaacgcctgttagcagcatttgctcctattgaaaagcagtaattgaagaggaaaggaagaagcagatggacaaagaaacagcgaagcagcgggcagaagaactgcgccgcaccatcaacaagtatagctatgaatattacaccttagatgaaccgagcgtcccagatgccgaatacgacagattgatgcaggagctgattgcgatcgaggaggagcacccagacctcagaacgcctgactctcctacgcagcgcgtcggcggagccgtgcttgaagcgtttcaaaaagtcacccacggcacaccgatgctcagtctgggcaacgcctttaatgctgatgatcttcgtgatttcgaccgccgtgtgcgccaagccgtcggcgacgatgtggcgtataatgtggagctgaaaatagacggtcttgctgtttctctccgttatgaagacggctattttgtcagaggggccacaagaggtgacggaacgactggagaggatattacggagaacctgaagacgatccgcaatatcccccttaaaatgaaccgtgagctgtcaatcgaagtgcgcggagaggcgtatatgccgaaacgttcgtttgaagcactcaatgaggaacggattaaaaatgaggaagaaccgttcgccaatccgcgaaatgccgcggcgggatctctcaggcagctcgatccgaaaattgcagcgaaacgaaacctcgatatcttcgtctacagtatagcggagcttgacgagatgggtgtggagacgcaaagccaagggcttgattttctcgacgaactcggatttaaaacgaatcaggaacgaaaaaaatgcggcagcatagaagaagtcatagtgctgatcgatgagtttcaggcgaagcgcgcagacctgccgtatgaaatagacggcattgtcattaaagtcgattctctcgatcagcaggaggagctcggttttacggcgaaaagcccgcgctgggccatcgcgtataagtttcctgctgaagaggtcgtgacgaagcttctcgatatcgaattaaatgtcggcagaacgggtgtgatcacgccgaccgcgattcttgagccggtaaaagttgccggcacaacggtctcaagagcatcccttcataacgaagatttaattaaagagaaggacattcggattttggataaggttgtcgtcaaaaaagcgggcgatatcatcccggaagttgtgaatgtcctcgttgaacagcgaacaggagaagaaaaggaattcagcatgccgacggaatgtcctgaatgcggcagtgagctcgtccggatcgaaggagaagtggcgcttcgctgcattaaccctgaatgtccggcgcaaatccgggaagggctgatccatttcgtttcccgcaatgccatgaacattgacgggctcggcgaacgagtgatcacacagctgtttgaggaaaaccttgtccgcaatgtggcagatttatataagctgacgaaggaacgagtcatccagctcgagcgcatgggtgaaaagtccactgaaaacctgatcagctccatccaaaaatcaaaagaaaattcgttagagcgtttgctgtttgggcttggtatccgttttatcggatcaaaggctgcaaagacgcttgccatgcattttgaaagcttggagaacctgaaaaaagcctcaaaagaggaacttctcgcggtagatgaaatcggtgaaaaaatggctgacgcggtcatcacctattttcataaagaagaaatgcttgaactcttgaatgaacttcaggagctgggcgtaaacacgctctacaaaggcccgaaaaaagtaaaagcagaggacagcgactcttactttgccggtaaaacaattgttctgacaggaaagctggaagagctgtcaagaaacgaagccaaagcgcaaatcgaagcgctgggcggaaagctgactggaagcgtcagcaaaaacacagacttagtcatcgccggagaagcggcgggaagcaagctgacaaaagcacaagagctgaacattgaagtgtggaatgaagaacagttaatgggagagctaaagaaataagaggagtgttttctattgaaaaagacgttggcattggcggcaacggcggcagtattaatgctgtctgcctgctcgtcaggttttgggggggagaaggaggaagagattacgcaaaagacggcgaaatcgtcagaaaaagcgattgtcccgaaatataatatctctgactcctattacaaaatggtgctgccgtttaaggcaggcaaagcgcgcggcttaacaacggaacagctgaacactaggctggacattgacgagtttgaaacagggctgatgcgtcttgcccaagattctttctcgactgacgattatctgttccaagaaggacaatatttagatgaggatacagtattaagctggctggcacggaaaaaaacgggctctgatttgaaaaaagccgaaaaagaagataaaaacttcaaaaatgaaggcttgaacccggcgctcccgagttctggttcaacagaagaaaagaacgaaagcagcccgatttatttagcatccatgcttgagcacgattatttagtcagaaaagacaagaattctatccagcttggcggcgtcatgatcggactggcgttaaactcagtgtattactatcgtgaaaaaactggcgacccgcaaaaagaagtggagattaaagacagcacgcttcgccagcagggagaaaaaattgcacaggaggttattaaccgcctccgcaaaaaagataacttgaagaatgtgccgattaccgtcgcgctctacaagcaggcgtcaaaaacatcgattgtgccggggaacttcatcgccaaaacagaggtcaaagcaggctctactgatatctcaaattgggatgacatcaatgaaaaatatgtattctatccggcagatacaaccacagcagaaaaatacccggatgacaccgaggtctttaagcggttcaaaaactcaattgaagaatatttcccgaactatacaggcgttgtcggtacagcgctgtatgaaaatgatgaaatgaagaaaatgaagattgacataccaatgcaattctacggaaaaagtgaagttgtcgcgtttacccagttcttaacgggtgaagtgatggactactactctaagagctcagttgatgtcgaagtcaatatcacgtcctcagacggacaggaagcggtcattatccgcaatgccggagataaagagccgactgttcacatttatgactgatagaaaacccttgtgccatattggcacaaggggttttatgttacaattaacaggaaaagggaaaatatttccgcttctgccgaaacacaaatcaaggggaggtatgttgatgctggaaatcgtgtgaaaacaatcattatcaaatctatagcaatgaaaggatgttagacatgcataaagatatcaaaaaaatatttgaggaagagcaggttttggcagaagctgcagcgagatacggtttctcaaaagatcaggtgcgttttctggctgatgcggaaaactatgtatatgaatgtatgaaagacaatcaaccttatattttaaagattacccatacgattcggagatcttctgattatataatgggagagatggaatggctccgtcaccttgcaataggaggaatttcagtagccaaaccgctcccgtcgctgaacggaaaagatgtagaagcagtgccggacggaaacggcgggtcatttttattgagagtgtatgagaaagcgccggggcaaaaagtggatgaatcggactggaatgaaacgctattttatgagcttggcagatacacaggcagcatgcacagcttgacaaaaagctacaaattgagcaatcccgctttcaaaagacaggaatgggatgaagaggagcaattaaagctgagaaaatatgtacctgaagatcagataaaggtgtttcagcaagccgattatttgatgaatgaactgcggaggctcccgaaaagccaggacagctacggcttggtgcatgcggatctgcaccatggcaattttaactgggatcatggcaaaatcacggcatttgattttgatgatatcggctacaactggtttgttaacgatattagcattcttctctacaatgtcctgtggtatcctgttgtgccatatgatgataaagctgcgtttacagaagaatttatgacgcattttatgaaagggtactgggaggaaaatgagcttgaccctacatggctgatgataatacctgatttcctccgccttcgccatatgctgatttacggattgctgcatcagatgtttgaccttaacacaataggagaagaggaaaaagaaatgctggccggtttcagaagagatatagagaatggcacgccgattacagcatttgatttttcagcactggtgtagatagaaaaagccaatgggattccagtcccattggcttttataatgtatcacacttcacgccgactacgccttcaatggctttaatgtcatagtagacatcggtcgtgtatctgtttttatggacgcggaccttcacttccataattggaaaatccttttcgcctaggtcgtcgatccgaacggagtgtgctttgatatctcttcttttcatttcttttaaaatctctgtcattttgtctttatcagaaagtgacattctgatgcggatgtctttttcctgcaggcggtcggggccgatttttctgaccacccatgggagaaattccacgctgatcaggatgaacagaagactggcaaacgcttctttataaaaaccggctcccgtagccagcccgagccccgctgccccccagatcatggccgatgtcgtcaggccggaaatgacatcattgctttttcgcaggatgacaccggctccgataaacccgacgccggagatgatttgtgccggcagacgaagcggatccatcatgatgcggtagtatttagggaaatgatatgccgcattaatactgacgatcgtcagcatgcatgagctgactgcgatgacgatacaggtttttaatccgagcggcttattttttaattcgcgttcaagcccgatgaccatgccaatcaatgtggcaatgcccaatttcaataaaatatcaggatcaatataccagctcaacagcaacttcccccttctctaaggtgtttttaaataaatatgattttctcacagtatttatagcaaaacaagggtacaaaagccaccaagctgcgcttgatggcttattgcttactttttgcgttttaacagcttttccatgacaccgaataatcggtaagaggcttttgcaggacgttttgtgatcatgctgacaatgatgccggcaatcatactgagaataaacccagggatgatttcgtacacaccggttgattttgccaggccggttgtaatccagatcaacacggtcgcagccccgacaatcatggcagcaagcgcgccccattcgttcattcgcttccaatacagactgagcagaatcgcaggtccgaaagctgaaccgaagccggcccaagcgtatccgaccaaatcaagaatggtgctgttcgggttcaatgacaagagtaccgcgataacggcaatgactaagacggacaatcgcccgatcatgaccaattctttatcagaagcttttcgtctgaaaaatgaccggtataaatcctctgttacagcacttgctgtgactaagagctgtgaggaaatcgaactcatgatggcagccaaaatagctgacaataagaaccctgtaattaatgggtggaacaagattttagagaagataatgaaaatcatctccggatcttttacagcaactccgaatttatgggcgtatgcaacaccgattaaacccgtcagcacggaacctagaactgtaatgatcatccagctcataccgattcggcgtgcaggttttaaatctttaatgtctttaatggccataaatcggacgatgatatgaggctggccgtagtagcccaacccccaggctaaataggaaataatgctaatgacgctcgcgcctttaaaaatatccaataagtgtgggttaacagcgtcgatttcatggaaagtcggagcaacgccgcccacatgggtaaaagcaacgatcggcacaagcactagtgctgcaaacatgatcgcaccctgcacgaagtcagtcagactgacagcaaggaaaccgccaaacagtgtgtataatacgacaactgcggtggtcagaaacaagcctaatttgtaatccgcaccaaaagcagattcaaacagccgtccgccagataccataccggaagaggtatacaatgtgaaaaagatcatgatgatcaatgcagatacgattttcagcagtgatgaagaatgctggaatcgtttatcaaagaaatcaggaatcgtaatcgcatcatccgccgcttctgtataagcacgcagccttggagccagcagcaagtaatttgagtacgccccgattgtaagacctaaagcaagccataaggtggacagccctgtcgcaaacatcgcgccgggaacacccatcagcatccatccgctcatatcggccgcgccggcagacaaagcagtaacgaatggtccgaggcctcttcctccaagcatgtaatcattgatgtcagtggttttcttgaatgcataccagccgattaacagcatggcaataaagtaaattcctaaagatataataatttcaatactcacgttttaccctctcttcatttctaataatgttgcatcacctctcaaattgatggtgccagttaagcagcctggcgtaagtgcaaaacaaaagaaattcctttgcgggtgcacttggtaacttaacctaacaaagtattcccggccattcaagcgatgaaaccttgatcatgagcggggaaaaccgttgcaaacctagaagggaataaagaataaaacgctttcaagaaataattaaagtaaaaatattcagaaaaatatttcgtttctccttctcctcattttagtataaaatatatagggtattgtttcgaaaacacaggcctgtctcaaggcgttttgttgctttaaagggcttgtttttgatatgatcagtattatatgacttaacggagaaatatgtggaggtggatcatatgtcacgaatttcaatagaagaagtaaagcacgttgcgcaccttgcaagacttgcaattactgaagaagaagcaaaaatgttcactgaacagctcgacagtatcatttcatttgccgaggagcttaatgaggttaacacagacaatgtggagcctacaactcacgtgctgaaaatgaaaaatgtcatgagagaagatgaagcgggtaaaggtcttccggttgaggatgtcatgaaaaatgcgcctgaccataaagacggctatattcgtgtgccatcaattctggactaaaggagggacacaagaatgtcattatttgatcataaaatcacagaattaaaacagctcatacataaaaaagagattaagatttctgatctggttgacgaatcttataaacgcatccaagcggttgatgataaggtacaagcctttttggcattagatgaagaaagagcgcgcgcatacgcgaaggagcttgatgaggcggttgacgggcgttctgagcacggtcttcttttcggtatgccgatcggcgtaaaagataatatcgtaacaaaagggctgcgcacaacatgctccagcaaaattctcgaaaactttgatccgatctatgacgctactgtcgttcagcgccttcaagacgctgaagcggtcacaatcggaaaactgaacatggacgaattcgccatgggatcatctaccgaaaactcagcttacaagctgacgaaaaacccttggaacttagaaacagttcccggcggttcaagcggcggatctgcggctgcggttgctgcgggagaagttccgttttctcttggatctgacacaggcggctccatccgtcagccggcatctttctgcggcgttgtcggattaaaacctacatacggacgtgtatctcgttacggtctggtcgcatttgcgtcttcattagaccaaatcgggccgattacacgtacggttgaggataacgcgtttttacttcaagcgatttccggcgtagacaaaatggactccacgagtgcaaatgtggacgtgcctgattttctttcttcattaactggcgacatcaaaggactgaaaatcgccgttccgaaagaataccttggtgaaggtgtcggcaaagaagcgagagaatctgtcctggcagcgctgaaagtccttgaaggtctcggcgctacatgggaagaagtgtctcttccgcacagtaaatacgcgcttgcgacatattacctgctgtcatcttctgaagcgtcagcgaaccttgcacgctttgacggcatccgttacggctaccgcacagacaacgcggataacctgatcgacctttacaagcaaacgcgcgctgaaggtttcggaaatgaagtcaaacgccgcatcatgctcggaacgtttgctttaagctcaggctactacgatgcgtactacaaaaaagcgcaaaaagtgcgtacgttgattaagaaggatttcgaggacgtatttgaaaaatatgatgttattgttggaccgactacaccgacacctgcgtttaaaatcggtgaaaacacgaaggatccgctcacaatgtacgcaaacgatatcttaacgattccggtcaaccttgccggcgtaccgggaatcagcgtgccatgcggattagcagacggacttccgctcggcctgcaaatcatcggaaaacactttgatgaaagcactgtataccgcgttgctcatgcatttgaacaagcgacagaccatcataaagcaaaacctgaactgtaaggggtgaaaagaattgaactttgaaacggtaatcggacttgaagtccacgttgagttaaaaacaaaatcaaaaattttctcaagctctccaacgccattcggcgcggaggcgaatacgcagacaagcgttattgacctcggatatccgggcgtcctgcctgttctgaacaaagaagccgttgaattcgcaatgaaagccgctatggcgctcaactgtgagatcgcaacggatacgaagtttgaccgcaaaaactatttctatcctgacaacccgaaagcgtatcagatttctcaatttgataagccaatcggcgaaaacggctggatcgaaattgaagtcggcggaaaaacaaaacgcatcggcatcacgcgccttcaccttgaagaagatgccggaaaactgacacacacaggcgacggctattctcttgttgacttcaaccgccaaggaacgccgcttgttgagatcgtatcagagccggatatccgcacgccggaagaagcgtacgcgtatcttgaaaagctgaaatccatcatccagtatacaggcgtttctgactgtaaaatggaagaaggctcacttcgctgtgacgccaatatctctcttcgtccgatcggccaagaggaattcggcacaaaaacagaattaaaaaacttgaactcctttgcgtttgttcaaaaaggccttgagcatgaagaaaaacgccaggagcaggttcttctttccggcggcgtcatccagcaagaaactcgccgttatgatgaagcaacgaagaaaaccattcttatgcgtgtcaaagagggatctgacgactaccgttacttcccagagccggatctagtcgagctctacattgatgatgaatggaaggaacgcgtaaaagcaagcattcctgagcttccggatgagcgccgcaagcgttatatcgaagagcttggcttgcctgcatatgacgcgatggttctgacgctgacaaaagaaatggctgatttcttcgaagaaaccgttcaaaaaggcgctgaagccaaacaagcgtctaactggctgatgggtgaagtgtcagcttacctaaacgctgagcaaaaagagcttgccgatgttgccctgacacctgaaggccttgccggcatgatcaaattgattgaaaaaggaaccatttcttctaagatcgcgaagaaagtgtttaaagaattgattgaaaaaggcggcgacgctgagaagattgtgaaagagaaaggccttgttcagatttctgacgaaggcgtgcttctgaagcttgtcactgaggcgcttgacaacaatcctcaatcaatcgaagactttaaaaacggaaaagaccgcgcgatcggcttcctagtcggacagattatgaaagcgtccaaaggacaagccaacccgccgatggtcaacaaaattctgcttgaagaaattaaaaaacgctaataaaaaagcagcccttagaggctgctttttttatggtcaaattgagataaagacagagatgagggcccgaagcctttcaacttctttgtcgttggttccggtcaaattggacagcatgcctttaataatcggcttgcgcggtttatcctgagtcaattcttcctcgataacatcaagtgacacggtgatatcctcgggcagcgtgctgttttctttcactttctgaatgtcctcaagcagctggtcttttcccgcaggcatcgggttgaaaatgtcttttgatacaatcggattgagtgcagaacggctcagcccctgtacaagatcattcagtctctcaataataaaggctgagatttcttctgcatcgatattaagctcaccgttaaataccatcacgttcatataggaatgcacaatgcctcttgccatgatggacagatctgcgacataccgctcgattccttcgccataggataccagcaaggcgttccggtacagcttatccgtctccatggttactttgtaaaagtattgcttgatttcttgattttccggaatgatattttcggtaagcaaaagaacgataaaatctttatgatcgcgaaaatcctcaaattgagcgccaatttgcttttttaacacttccttagggggctttccggcgagatcttcttctatatttttcattttgttcatagacataccgatataatattcacaggcagataacagcagcgcttctttcgatttgaagtgcaaataaaaagcgcccttcgaaatgccgcattcactggcgatttcttggatcgtcgtagctgcgaatccttttttcgcaaataaacgaatgctggtttttatgattctctcttttttttcattcatgacgtgcttccccttaatccttgaaaaatttagtaaaattttctggtatatgagttgacgttgttgcgttataacgtttagtattatatagaatgaccagtcagtcaataaaaaatgtaatggaggatatgatgaaccacgttattaatttcgttctgaaaaacaaattcgccgtatggctgatgacgattattgtaacggcagccggcttgtatgcgggtatgaatatgaagcaagagtctattcctgacgtgaacatgccttacttgacgatcagcacgacatatccgggtgcaacaccaagccaagtggctgatgaagtgaccaaaccggttgaacaagccgtacagaacttggacggtgtcagcgttgtgacgtcgacgtcctatgaaaacgcatcgtcggtcatgattgaatatgattatgagaaagatatggacaaagcgaaaacagaagcagctgaagcgttagaaaacgtcaacctgcctgatgacgcgaaggatccggagatttcacgctacagcttgaactcattcccgattctgacgctgagcgtgtccagtgataaagataatctacaagagctgacgaaacaagtggaggacagcctcgtttctaaacttgaaggcatagaaggcgttgcgtccgtccaagtatcaggccagcaggtggaagaggttgaattctctttcaaagaagacaaactgaaggaatacggccttgatgaagatacagtcaagcaagtgattcaaggttcagatgtgacaactccgcttggattgtacacattcggaaatgaagaaaaatctgtcgtcgtcagcggcgatattgaaacaattaaagatttgaagaatatgagaatcccgacggtatctgcttcaagtgcaggcagcagcgcagcatctcaagcgggtgcgcagagtgctcaagcagcccaaagcgcacaagcggcagcacaggcgcagcaaagcgcaagcacagcagtgccgacagtcaagctttctgacattgctacaattaaagatgtgaaaaaagctgaatctgtttcacgcacaaatggcaaagacagcatcggcatcaatatcgtcaaagcaaacgatgcgaatacggtagaggttgccgacaatgtcaaagctgagctgaagaagttcaaagaagaccataaaggcttcaattacagcgcaactctcgacatggcggagccgatcacacagtcagttgacacgatgttaagcaaagccatcttcggtgctatttttgcgattgtgattattctcttattcttaagagatatcaaatcaacattaatttctgttgtttcaattccattatcattgctgatcgcactccttgtgctgcagcagcttgatatcacattgaatattatgacgctcggcgcaatgaccgttgccatcggacgtgtagtcgatgactccatcgttgtgatcgagaacatttaccgccgcatgagactcaaagatgagccgctccgcggaaaagccttggttcgtgaagcgacgaaggaaatgtttaaaccgatcatgtcatcgacgattgtgacaattgcggtattcctgccgctcgcacttgtaggcggacaaatcggtgagttgtttattccgtttgccttaacgattgtttttgcgcttgccgcatccctggtgatttcgatcacgcttgtgccgatgctcgcacacagcctgttcaaaaaatcattaaccggtgcgccgattaaagcgaaagaacacaaaccaggcagacttgcaaacatctataaaaaagtattgaactgggcgcttagccacaaatggatcacgtctatcatcgctgttctgatgctccttggaagcttgttcctcgtaccgttaatcggtgccagctacctgccgtctgaggaagaaaaaacgatgcagctcacatacagcccagaaccgggtgaaacgaaaaaagaagccgaaaatgaagctgaaaaagcggaaaaaatcctgcttgaccgcaagcatgtcgatacggttcagtattcattaggctctggcagcccgcttgccggaggagattctaacggtgcgttattctatatcaaatatgaaagcgacacacctgactttgataaagaaaaagataacgttctgaaggaaatccaaaagcaatctgaccgcggagaatggaagtcacaggacttcagctcttcaggcaataacaacgaattaacatactatgtgtatggcgattctgaaaacgatattaaagacacggtcaaagatattgaaaaaatcatgaaggatgaaaaggatctgaaaaacgtaaattcaggcctttccagcacatatgatgagtacacatttgtcgctgaccaagaaaaactaagcaaactcggtttaaccgcgtctcaaatttctcaggccttaatgtcacaaacatcgcaagaaccgcttaccaccgtgaaaaaagacggcaaagagcttgatgtgaacattaagacagaaaaagacgagtataagagtgtgaaagatttagagaataaaaagatcacttccgcgactggccaggaagtcaaaatcggcgatgtggcaaaagtgaaggaaggatcaacatcagataccgtgtcaaaacgtgatggaaaagtctatgcggatgtcacaggtgaggttacatctgacaacgtcacagccgtatcaactgctatccagaagaaaatcgataagcttgaccatcctgataacgtatcgattgacacaggcggcgtatcagcggatatcgctgattccttcacgaagctcggtttagcgatgctggcagcaatagcgatcgtttaccttgtgctcgtgattaccttcggcggagcactagcgccatttgcgattctgttctcattgccgttcacagtcatcggtgccctggtcggactttacgtatcaggtgaaacgatcagtctgaacgccatgatcggtatgctcatgctgatcggtatcgttgtcacgaatgccattgtcttaattgaccgcgtgattcataaggaagcggaaggcctgtctacgagagaagcgctcctggaagccggctctacacgactccgtccgatcctgatgacagccattgcgacaatcggcgccttgattccattagccctcggcttcgaaggcggaagccaggtcatttcaaaaggactcggcgtcacggttatcggcggtttaatcagttcaacgcttctgacgctcttgatcgtgccaatcgtatatgaagtattggcgaagttccgcaagaaaaaaccgggaacggaagaagagtaaaaaaacaaaaagcctcagctatgctggggctttcagcttgttgaaaaaccctcgcattcgttgtcaggtctgcgcgtcggtgctcacgaattctacattcactccgctccaatgctcccccttcctagactacaagggttttcaatcaagctgaaagaatgttaaggatgacaaaagctcaaaacaagaatcagttttgagcttttgtgcgttttcacctgtaagattatgtacattttgttgcgatttttttaactcatagtataattaaaggttgttagtgtaaaaatggatcggatactcttaagtaggatgatgagataatgaaacgtgcacgcataatatacaatccgacttcaggacgggagatctttaaaaagcatcttgcccaggtcctgcaaaaatttgaacaagccggctatgaaacctccacccatgcgacgacatgcgcaggagacgctacacacgctgccaaggaagcggcattgcgtgagtttgacctgatcattgcggcaggcggagacggaacgatcaacgaggtcgtcaacgggcttgcgcctttagacaaccgtccgacactcggtgtgattcctgtcggcacaacgaacgacttcgccagagcgctcggcattccgcgcgaggatattttaaaagcagcagatacggtcattaacggcgttgcccgcccgattgacatcggacaggtcaacggccagtattttatcaatatcgccggaggaggccgcctgacggagctgacgtacgacgtgccaagcaaactcaaaacaatgctcggccagcttgcttattatttaaaaggaatggaaatgctgccttcacttcgtccgacagaagtcgagattgaatatgacggcaagctgtttcaaggtgaaatcatgctgtttttggtcacgctgacaaactccgtcggcgggttcgaaaagctcgcgccggattccagcctgaatgacggcatgtttgatttgatgatactaaagaaagcaaaccttgctgaatttatcagggtcgccacgatggcgcttcgcggcgaacacatcaacgaccagcacattatttatacaaaagcgaaccgcgtgaaagtcaatgtatcagaaaagatgcagctgaacctggacggcgagtacggcggcatgctgccgggcgaattcgtgaatctgtaccggcacattcacgtcgtcatgccgaaggagaaagcggaacagctggatgactaaaacttggctttgtaagccaagctcagaatgttgacaaaatcctaaaacagttttcgttttaggattttgtcatcttttcagcgtgattgaaaacctttgaagtctaggaagggcgagcatcggagcacagcgaatgttgaattcgtgagcaccgaagcacaggactgacaacgaatgcgaaggtttgcctacacgctgaaacttggcttgaataggccaagtttttctttcgcttaaaacaagaggtgaacatacatgaaaatgaaacccccagtagaaaaaaacgaatactatgacgtgacatttgaggatttgacccacgaaggagcgggtgtcgcaaaggtccaaggattcccgatctttgtgccgaacgccctgccggaggaaaaagcccaaatcaaagtcacacgtgtcaaaaaagggttcgccttcggccgtctgattgagctgaaggaagaaagcccgcatagaacggatgccccatgcccgatttacaagcaatgcggaggctgtcagcttcagcacatgacctacgaaggccagctcttgtttaaacagaaacaagtcaaagacgtcttagaacgcatcggcaagctggacctttcaaacgtcaccgtgcacccgacactcggcatggaagacccgtggaactacagaaacaaagcacaggtgccggtaggagaacgggaaggcggactcgtcgcgggattctatcagcaaagaagccatgacatcatcgacatgagcgcctgcctgatccagcaatccaaaaacgacgaagccgttcaagctgtcaaagacatttgcgcaaactacggtgtcaaagcctacaacgaagaacgccacaaaggctggctccgccacatcatggtcagatacggcgttgttacgggcgaaatgatgatcgtcttcatcacaagaacaagcgacttcccgcacaaagcgaagatcatcgaagacatcacagcgcaattcccgcacgtcaaatccatcgtgcaaaacatcaacccaaacaaaacaaacgtcatttttggcaacgaaacaaacgtcatctggggcgaagaatacatctacgacctcattggagacgtcaaattcgccatctccgccagatcgttctatcaggtcaatccggagcaaaccaaagtgctctacgacaaagcgcttgagtacgctgagcttcaaggggaagaaaccgtcatcgacgcctactgcggcatcggaacgatttctttatttctggcaaagcaagcgaaaaaagtgtacggcgtagaaattgtaccggaagcaattgaggatgccaaacgaaacgccgagctcaacggcatcacaaacgctgagttcgcggtcggggaagcggaaactgtgattccaaaatggtatgaagaaggcattacagctgatacgctagtcgtcgacccaccaagaaaaggctgcgacgaagccctcctgcggacgattgtggagatgaaaccgaagcgggtggtgtatgtgtcctgtaatcctggcacgcttgcgagagacctgcgggtggttgaggatggcgggtatcagacgctcgaagtgcagcctgtggatatgtttccgcatacgaatcatgtggagtgttgcgtgttgcttgaaaaaaacatgtgtgagttcgagaaattatagtatatctcggacttccgtcttctttaattcttcgatacactcaattggtttgtgaagaattttttcatcaatagttgggtttgagtgaattgttcaagttgttttagtaaatcatttaaattatctttaagtcggattaaggtctctaatcggagtctctacgcgattttgttttcagataggtatttgtttcaattggataggcttaacaaacaaatttgaaaaaagatcaataagcaacaagtcgaattaccagtcttacagatgtttaatacaatcgaaattgtcccctttgattatcaagggaagttagaggataacatagcagatgctattatgaccattaaaggagcaaataaatcttactttgatgtttgttgattttctttaacgctcattgttctaaagcaaatcttgacaaacggcaaattgtttttggtgttggtcaagatttggattgtctattgtttagaagacaccaataaaaactgcttttaaaaataattaagattgacaaatgaacgacgtagacagctttatgagcaaataaaccaattgtaaaggaaaaaaatcaaatataatcatattgttttcaatgaaaatgaaattacatttactattcccgatatcatagatgtaatcaataggatacaggctgtcataactcaattaaagcaagtgttaataaccgttgatccattggtaagtgaatatgccgaaacttgtgtaaggaagctctctaattagggggctttttgctttaaaaagaatagacatgtatcaattgacaaggaaaaggaaaaagttatatactgtatttaacaaatgttaaatcttctatttaacatagaaataggaggtgtaaaatgcaactcggcgatattgctaatgtaaagacagggcttgtgttaagtaggaaaaaggcagaagttgaatatgatgcgaaagctacatacaagctactttcactcaaaaatattgcggaagatggcatgattgaaaacgattcgtttgaggagtttgtaagtaatgacgatttagacgatcactactttacaaaagaaggtgatgtgctaatgcggttgagccacccacacacagcggttttcattgaaaaacaatatgaagggttgttaattccatcgtatttcgccatcattaaagtagacaaaacaaggttcctacgagagtacattgcatggtatctaaactcatttgaagtaaaaaaagagttggaacgctctcagtcaggtagtcgtatccccagtaccaatcaaaatgtaattaaaacactccctgttgtctggacaactctatcaaagcaaaaagcattaatcgaactttacaagctccatcaaaaagaaaaaatgctttataagagattaattgaggaaaaagacttattattccaagcgatttcacaacaaattttaaaggattcaaaatcggagggaaatattaatgattgaactaacaacacaagacaaaattaacagtgttttatggcaggccgcagatacttttagagggaaaattgattcctcaacatataaagattatattctaacaatgctatttataaagtatttaagtgatacatacaaggagcatttggaagaatatacgaagaaatataatggtgatgaacgacgcattgaacgtgctttatcaagagaacgttttgtacttgatgaacaatctacttttgattatttgtatagcaaaagaaatgatcctaaaattggagaaatcattaacaaagcattggaacgcattgaaaatgaaaacacaggtaaacttcgtggtgtatttcgtaacattgactttaacagtgaatcaatccttgggcaagcgaaagagcgaaatgcaatgttacgatcacttttggaggattttagacatttatctctaagaccatcacagttaggaaatgaagatatagtagggaatgcataccagtacatgattggactttttgcatcggatgcaggtaaaaagggtggcgagttctatacacccgctgaagtatcagaattactggcacgtttagttaaaccgcaagaaaacgaccgtatttatgatccaacatgcggatcaggttcgttgttaataaaagtggctaaacaggttccaagtagaaaagttgctatatacggtcaggaacgtaatggtgcaactcattcattagctcttatgaacatgtacctacatggggttgacgatgctaagattgagtggggcgatacattagcaaatcccttacatttagaggatggaaagttgatgaagttccaagcaatcgttgctaatcctccattttcattagataagtgggctatgggcttcgcaggagaaggaacaaatgacaaaaaatttaaaatggagtcaagttttgatccctatagacgttttgagtggggagtacctccaagttcaaaaggagactatgcatttgttcaacatatgctttattcattagctgaaaatggacgtatggctactattcttccacatggcgtactgttccgaggggcaagtgaagggaaaatacgtcaacaaattattgagatgaacttattggatgcggttattggtttaccagaaggattattttttggaacaagtattcctgcgtgtatcatggtatttaaaaaagaccgaaaacgaaatgatgttctttttattgatgcatctactgaagaacattttgaaaaaggaaaaaatcaaaattaccttcgagaaaaggatattgagagaattgttaggacatatgagaatcgggaaacaattgaaagatactcttatttggcaacaatagatgaaataaaagaaagtgaatttaatctaaatattccaagatatgtggacacttacgaagaagaggaacctgtcgatatgattacagtgaaaaataatatttcgaatataaagaaggaactacaagaagtagagttacaaatggagaagtatttgaaagagcttggattgtaggtgaatatacttgactaaaaataattatgttagaacggcgattggagaattaccttcagattgggaagtagaacttcttgataatatagcagaaagaaaatctggtcatacaccagataagaagatagaagagtattggaacggaaatattccctggatttcattgaaagacttatcacgattaaataaagggtttgtatatgaaacaacggattttacaacaaatgaagggattaagaactcttctgctgttttgttacctcaggggacaatagtcatttcaagggatgctacagttggaaaggttggaattcttgctgaggagatggctacgagtcaacattttatcaattatatttgtggggatagactgaataacgtttatctatactaccatttactatttagaaaccacattttcgaaaggattgctacaggaagcacaattaaaacaattggtttaagtttctttaaaaaactaaaggtagcactacctccaattagggaacaagaaagaattgcttctatcctttctgcttgggacaatacaattgatttaaaagaaaaactaattgattataaaaatgagcagaaacaaggattaatgcaaagattattgacaggagaagtaagattgccagggtttaagggggaatggaaaaaggaaaggattggtaaactcataactgaaagtaaagaaatagcaagtaaaccagatcttaataaaagaataaccgttagacttaatttaaaaggtattcagaaaagagatgtttcatctacagaaaaggaagatgctacaactcaataccttagaaagtcaggacaatttatttacggaaagcaaaatcttcataagggagcttttggcataattcctaaagcgttagaaggttatcaatcttcttcagatattcctgcattcaattttaatgaggaagttgatccttattggtttttttactatttttcaagggagagcttttatacaaacttggagaaaatatcaactggtacaggatcgaaaagaattaacccaaaagatttgtttaaggttaaaatccattttccaccttatacagaacaacaaaaactttcagaagtctttttatgttttgatagagagattagtctacttaaagaagaggtcgaagcattaaaagaacagaaaaaaggtcttatgcaattacttttaacggggaaagtcagagtaagggtataaatcatttactttatttcttcgtttttattaggaggtgtagagatggcaagggagaagagttatgatgaacgttacataagccaagttcctgcaattgaggttcttcgaaggttaggttatcaatatcttgaaccagaagaagccgagcagatgcgtgggaatttgtacaacgtattacttagaaatgttttgcaagaaaagttacggtcatttaattcttatgaatacaaaggggaaatatataagtttagtgactccaatatccaacaagctattcgagatttagatgaaccattaacaaatggtcttgtaaagacaaatgaagcgatttatgaaacgttaatgaaaggaagaacatattctgagtttttacctgatggctcaaaaaagtcatttacaattcaatttattgattggaagaacattgaaaataatgtgtttcatatagtggaagagtttaatgtggaacggatggatggacgtggaaacgttcggcctgatattttactgtttgtaaatggtattccttttgttgtaattgaatgtaagaaagcatccatctcgatggaacaagggataagtcaaatgattcgaaatcagggtaaggattatgttcctcaactgtttaagtttgtacaaatggttatgtctactaacaaaaatgaaactaagtatgcaacatgtaatacaccaaaaaagttttggtctgtatggaaggaagaaaaagaagtatggttagagtcttggttggacaaagctgtagaaagtagattgccaacaacacaggataagaatattatttctctgtttcatcctaagcgtttattagagatcactcaatttttcactctgttcgataaagacgtcaaaaaagtagctcgttatcaacaatattttgctataaaagaaatcattaaaacaattcaagaaagagatgaacatgggaatcgtcaaagtggtgtgatttggcatacacaaggatcaggaaaatcactaacgatggtgatgttagccaaatacattctttctgagttgtttgaatataatccgaaagttgttgttgttacagatcgggttgaattggataaacagattcataagacgttccgtcatacaagattaaaggcaagtagagcaacatcgggcggccatttaattgatctaatcaatgacaacaatgctgatattgtcacaacgttggttcataagttcgatacagcatcttcaaaacaaaaaccaattgagtcaaaggacatttttgttttagtagatgaatctcaccgaacacaatacggagagcttaatataaaaatgaaaaaggttttccctaatgcatgctacttaggttttacaggcacgccgttaatgaaaaaagaaaaaaatacgatgattaaatttggaaagctaattcacacatatacaattgcagatggtgtacgggataaggctattgtcccgttattatatgaaggaaaaatggttgatcaatcggttaatcaaaaggctattgataacagattagagatgattactcgtaatctaaatgacaagcaaaaggaagaagtaatgaaaaagtggagccaatttgaacgaattgcttcctccaaccaaagaataagtatggttgcatttgacataaatgaacatttttttaagaattacaaaacacaaggaagcaactttaaagcgatgttagctacaaatagcaagattgaggctattcgttactttgaatcatttgaagaacttggcgatttgaattgtgctgtagttatttctccacctgaccaacgtgagggacatgaagtggtcgatgtggaatcaaaggacaaagtacagcatttttggaaaagaatgatggatcgttatggaacacctgaagactatgaggatgccataaaagatgaatttattaatggtgatgaaattgacttactcattgtcgttgataaattgctcacaggttttgatgctccgagagctacagtgttgtatgttgataagccaatgaaagaacacactcttctacaagcgatagcgagggtaaaccgtctatatgaaggaaaggattatggctttatagtagattatagagggttattagataaacttgatcaagcaatgcaaatgtactcaggagcagggttagaaaactttgatcctaaggatttagagggagctatacatgatgtcattagtgtaattggttcgttaagacaatttcattctgatttattacaaatatttgctcctattaagaataaacaagatgttgaagagtatgaagtatggttagaagatgaagaacttcgagagagattttatgatgtattaagcaactttgggcggaatcttggtattgcattagaatctgaaaaaattcacaatgctctacggccagaggaacttcaaaagtataagaaagacttgaagtttttccaagagctaagaaaaagtgtgaagctccgctattccgacacaattgatcataaggaatacgaggcaaaaatgcaaaagctaatggataattacatttctgccgaagagattatccgtattacaaatcctgtagatattttaaatgaaaaagcattcgaggaagaattagaacgcctggattcaaaacgtgctaaagctgatgccattcgtactcgtttaacgaaaagtgtaagtgcaaaatgggatgaaaaccctgcattttataaaaagttctctgaacgtattcaagaagctattaaagaatacaaggataaacgaatctccgaagcagagtatctgaatcgaataaaggatataatgaaagattatcgcaaaggtgaatcaaatgacgattatccagaagtgattaaggaaaatcgaaaagcacaagcgttttatggagttgcaaaagaccttatgagcgaagttgcggagatttctgaaagttatggttcggatacactcggagatttagctttaaaaacggataaagtgattaaagaacaccaaaaggttgactggcataataatcttgaaattcacaatcgaattgcacaggacttagatgatcttctctttgattttgcagaagaaaatgggatagaaatagattatgatacaattgataaacttatagagcaaattaaaaccgttgctcttagacgttattaaggttgtgaacagcatggagagacatcaaatccagtacgtaaataaaataattgactttgctattcaacgaaagaatgttaagaatgttaatcttaacattaagcctgatatgacaatagaggtgtctgcacatgatgccgttccgttgaatttcatttatgattttgtgaaaagcaaaggtgcatggattgttaagaatgtaaaaaactttgaaaatgcacaaccaaatagccaaagtgggcgagagtatgtaagtggtgaatcctttaagtaccttggaaaacaatatcgtctacgagtgcaaaatactgaggaagaggaaatagtaaaatacttccgaggatttatctatttattcgttaaagatcccaatgattacgaccgcaaagctaaacttatggatgaatggtatcgtgagaaagcatttatgacatttcaggaatctcttaataagcaacttccattagtacaaaagtacggagttgataaacctaatcttgatttacgtacaatgaaagctcgttggggttccgctttaaccgacaagaatacgattttattaaatacagagctgataaaagcgccaaaattttgtatagattatgtaactttacatgagttaatccattttaagtacaatgaccatagtgaaagattttatgatatgctgtactcattaatgcccgattgggaaaagagaaaagcaattttagatgaagagattgtaaaagacttataagaaaaagaacctctttggcaacttaacaaccagattaatcaacaaaaggcagttcctaattttcatgtggagactgcctttttaatttcttattcggattttattggagaattggtctacaaaattgaggattaattgagaggtgaggtcttggacgaaaatatgtgggaattgtcgttcgcaagtggcaacaaactgcttcacacttcatctgaaatacggtgattcttcataacaggattagatgaacgaggattcgcttgtccaatgtgagtcatcattatctttcattctttcaactaaagacgcgataatagagaaatttttcctaataaaggctatctcgtcactttctgataaaggattttcaataatgaggttatcatcttttacaaatttgcaatctttgctaaccgcttgatgtacacgtaatggttttgcaacacgctgtaggtcgttctcttcttttgggagaagatcatttacaatttggacatgctgtttgctacttatggcagtgaactgtctttgttcatgggtataactctttaaaaaataatgtttattatagtttgataacatgaaattattctcattcggaggaggttttttattggataatacgtataatccttttgataagatgcagtttacatataacaattgtttcctttgtgggagtaaagatgtttcgcaaaaaactttagagcatgtattcccaaagtggttgttaaaaaggtttgagttatggaataagcaaatacaattattaaatggtacattaatttcatataggcaattgaccattccttgttgtaacaaatgtaacaacgaatatttatcacgtattgaaaacaaatttaggagggctgttgacaatggatatgatgcatttttaaatctagatgaagaaaccatctttttgtggtctgcaaaaattttatatggccttttatataagcaattatctttaccatttgataggaagtcaccgcgattgggaaccattacaagtcctgatctattagagaaatataggattctacatttattgttacaaggtgcgaggtataaaactaaatacgaagggaaaccatggtcaatctttattttccagagtcaagaatataaggatgaaagagattttgattatttcgatggattgttttccttagtgttagggattcgtattggaagagttagctttgtaatttgttttgaagatgcgggcatacagaaagtaatgtttgaggattattttagggatttgcaagagatatcattacatccgattcagtttaaggagatcatagcgaaagtacattataagcaaatcttatttagaaaaaatcctttctttatggttgttgaaggaaaagaaaacgatagaactgttttagtgaatcaaccaacaggagacttatttgatgaatgggatttcgaagattattcaaaaattttatcattgttttttaaaccttatggattacatttaaaagatatttatcacccacctggtaaaaccattagttttttatatggagaagaaggggaagttaaacatataccaaaataggtgtattatgaatgacaagataaataaaaaatgtataatttagggaaataagtcatctttgaaggcattgggaagaacccaatgctgtttttcattgttttacttttttgatttagttaatgccttctgctacctattgatataattcacccattttttctgtttccatagaaacctccagttttatttcaaaagctatatcaaatttatagatgtaggtagctaattaaaaattctttatcatcctcgtcttcaggcaaaataccaagagttttgtactcccataatgcaattctttgataccatctaactcagacgccaaaatatcgacattattataatcaagttggaattgactattgctatccaatgccaatgtatggttagtccaaacctgatcattattattttggtgcgcaattcttaatttctcaaaaagttctcggatttcccttaataaagttttgaagatatctttacttacgttgtattgggcaggtatatcttgtgaataaataatttggattattttctggttacttgaagtgaaagagaaccatggtagaatcatttaatacttctacataaagataaatttttgtccattcataaggtatgatgttatttaatttctgattaataagctgatacaaatcttgcatttttttagtttccaatcttttcaccttcaatcgtcgagaaatcttagttatcaaaatagctcagcagagaagggctgagccatttttgatttatagaccgaagtagtttattacaaattctttgtcgtcctcatctttaggcaatatccctaaattttgatatttccaaacatctcgtctttgaaggtcatcaagttcagaggataaaacattatcataattataatcaattgaaaactttccggtgttttctaattttaaagtgagattagtccaaatatcttggttgcctagtttaaattcctcttttagttcttcaaatagcttttgaatttcaattagcagttgatcgtaaatctcttcactcacatcaaagtgttccggtatataatgagaaaataaataatcactgttatttggtgttgtaaaataaaagtatatatctgctgagtcaccaagtatttcagcatataaaacgatcttttcccattgagatggaatcatttcatttagatgttcagcaatcttttgatatagttcacccattttttgagtttccattagattaacctctaactttgaattgttgatggcattatttaatatttaaataatccttaacaaattctttatcctcttcgtcttcggggaaaatacccaagttattgaactcccaaatcatttgtctttcgtattcgtccaaatcagactcaataacatcttcataatcataatcaattgaaaactttccagagctttcaagattcagtgtcaaatttgtccatgcttcgggattattttctttaaattcagtgtgtaactgcttaaacaactcttggaggtctagtagtagttcggtataaatttttttactgacctgaaattgttctggaatgtcgtgagagtatatatattcatcgttttctggtgtttgaaagaaaaaatacacttctctggaaccatctagtatttctgcataaagaacaactttgctccattcggaagggatcatgtcattaatttgttctgctattttttgatatagcacttccatcttttttgtttccactagattaaccccctggtttattttctatagtaacttgtctcgctctacgattacctatcttatattcaacattaaataatacaggtctaagtgaatctccctgataaaccggttctatattaacttttacttgcttaggaggttttccatttaacgcctttgaccacacttgctccattttgtaccatttcccgccgctcctattaatctgagaattcatcggcacgatattgtcgaactggcctgagcctttgaattgggtggcgattaaatggccgccgtcatcgtcaggctttcggtcctggggctttccagcattcgtctgtgcatattggtttcgttttgcttctcccagctgcaagtctgctttgacacttgtaattctaccatagttgtcagtcgtgtatgtgtagccttcttttgttttgtagatgatattgggcttcagcactttctttctgctccatcttgcgaaatgctcgccgtatttgacggttaccggcggtacatgtggtgctggagttcgtcttccgcttgatgacgttccgtatggtttcggaaggatgaccttggcgaatttttgcagtccttctttaagcgtgaccccgttgactgcgttgtaaggaacgcctgccggcactaaatcgtgacggggatgataggggagaatatccgcaagtgtgagatctccgatttgatttaatttggttttgacgtgtttttttgatacttctatgcctgtgtttactttttgtttgatgtgatcaacggtttgttttgagactgttatggctttttgggctgttgcagatttgcttgctgctgttttgacttttgccgtcactttggcggctgtgccagtttttgagacggcgccaacaccttttgtgccgacaactgatgtgacaacagtgcccactgcatatgagacccatcttgctcttgagtaggtgtcaccattcaccatgtctttttcgtatgattcttcgattgctgctgaaatggcttcatacgttttgatcgggtgagccacagctccggtaatcgcttcaacggttcctcccggatctgtgaccatatcccacaggcctacgaccgcgtccttcccggaatcataaaggccgacggcgacccctttgaagcctgcttcaagctcacgcgtgttttcaatttgggtgaagtatctctgctgttctgctgtcagattttcatagccaatcgtctttgccattgagtagaattcatcggcatccgcataatcatagtttttcagtctttctttcagtttttcaatctcgcgttccttcgcttcctctttcttaatcttcaagtaagcctcagtccgcttttcaatgtcgccttttttcttatgtatgtcactctcacggtacgctttggcgttgtagtggatgggtgtggcgtttttgcctttgcctgttgcttcttggagcttttggaagtcggacttgatgaattgttcgtttggttctgacagggcgtattctgtcttcaggtcttcgtccaaggcgtccaatttttccagtgtttttttgcgtttgtcgttggcatcggccagctcgtctttgaaggtttctgttgaaaacaggtcgagcgggaggatgtcgtcgatatcgttcaggatgtctttcatcgcttttttctgttcggacatgatggattttgattttttattggcatttgccagttcgtgctccaggaaggattcttcgatgtatgcgtcagagagggctttgtccttcgcggctccggcgatgctattgaaaaatgcgattttcatgtcgatgtagtcgatccattggtcggtgacgccgacgtggtcgtgatagaaggctttgatgttgctggcgccttttcctgaaaattcgctgtcactgagatcagcgacactttttaacgcttttctcaagttgaccatttgcgttcttagttctttgtactcttttgcacggtctgtcgcttccgaaagcagtgttttcgcttcaaatactttcatgaccatttcccttcttttgttcgctcaatatcaaaattttaccacggggcgggatgagggtgggggtgagaacgtgttttggtggaaaaatgagtcatttggcatgtgtctaagtacacggttttgatatgatgatgatagatcaattaaaaggggaagagctcatttggataaagatttcttaatcataaagatcaaggatattcaaaaaggcgacacgctaacgaaccgcgcctgcgggaactgggatatgaaattgtccagagcaaaagaatgtaaacgggcaattgttgttcggagcggtgtgattttaaatgtttacaagatcgttgacgcttgggaatcagatgaacccgccaagctcactaaaacgaataatagagttcggtttcaattggcagagtgccatgactattcttatatgattggcggtacgctgaaaacgaaaacgcaaaatccggtttcgagtctatccttagaaaccttaatggaactagtaaaataaaaggagcccagcatgtatctctataaagtaaacagccaaaaccaaatcgaagatattcgcgagaaaccgtttaaaaaagaaaaagagattcaggatttatgtgaaatcaatcttcagcggatgttggggctcaggtttgtgaaatctgaattcaggatcagcaatttccgcattgatacgttagcgtttgatgatgagacaaatgctttcgtgattatcgagtataaaaatacgaaaaacttcagtgttgttgaccagggctacgcctacttagcagcaatgctcaatcataaagcagatttcattcttgagtacaatgaaaatcatgatcttccgttaaagcgggatgatgtagactggtcgcagtcgaaggtcatttttatctcacctgtatttacggtgtatcaaaagcaatcgatccattttaaagatctgccaattgaattgtgggagattaaaaggtacgaaaatgatctgatccagttgaatcaaatgaaggctgatggcgtctccgagtcgattaagaccatttcacggcaaagtgagaccattcaagaggtcagcaaagaaattaaagtgttttctgaagaggatcatcttgcagataaaccgtttgacatcatagagctttatcagcagctaaaggaattcatttttaatttggacgatcatatttcaatcaaaccgacaaagctttatattgcgtttacatcaaataagcgaaatttcactgacattcttcttttaaaaagcggacttaagctgtgggtgaatatgaaaaagggagaattgcatgatcccgaggacagaatgcgcgatgtctctgagaccggccactggggaaatggcgactatgaaattttcataaaagatgatgaacacattgaatatatcatgggattgatcaaacaatcctatgagaaaaataagtgagaacttccattgagaagttcttttttattgtggcatgctaaagaagaattcatttcagtccctttcttcttctgtaaaaatgaaatgtacaaactgacaaaagacctataaaatgagaaagctatcatgagagagcagaagggtgagagagacaatgagttataaattagttgcgatgcttttatcgatactattcctattatcggcgtgttctaatagcggatcttctgataaggatcaggaaaagcaagcagtgaagaaagcgagcgttgcgatgctgacggagcaggaagtaaaatcagctttgaaaaacgatattgattcgatctttaatgcatttgataaagcgggaaaagaaaacggctggagcacggcaaacaaggcggatttcaacaagctgcggcctagtgtgctgccttatgcaacagaaacgtttgcagatcagaccttaaaggatttggccggagagtactattgcgagtgtgatgatccttttcaacccggctctgatttcgatgtgcgttttacatatgaacaggacaagaataagatagaggcttcatcaatagacccggcaacagaattaaacaacatgggcacggaatggacgtttgaattgatgaagcaagacggtaattggaagatcaacaaatgggacagcaagtcgcttcaaggggatgatatcaagctgacaaaagaagaagcgaaaacgattctgtctagaaacggtgaaacggcggaatttgtgaagtcctatgaatcgaaggctgccggcggaacagcttatcttttcaatgtgaaaagttcaaatggggaaagacaggcggcgatcagctcaaaggataccagtctggtaagtgataatgaaaacgagactgaagctccggagcaagagacagctcagacgactgcggaaaccgcatcgcctgatacagcggatacacagagcagtgagcagacaacaggaagcacaaaagcagattatgttgccaaattgtcagcgacagaacagaaagaaaagcacaatgactatcaaagtgattatcagatgattgaggattacggttacaattatcaaatgtgggacggattgctgaacgagatatacggcgtgctgcaaaagcagctttctgccccagacatggcggcattaaaagtgaaacagcgccaatggataaaggatagggatgctgcagcccagaagcgatatgatgaggagggcggcggttcattatcccgagtcgtccaaacggaagagcttgccaaacagacgaaagagcgctgttacgagctggtgaatacgtatttgaaataagattgacatgggacccttgcataaagggttcttttttatgaaaaaaacaaattgacaggatgaaaaaacaatttcttccttctatattgttttcaaaatttgggattgatagaatatgacatatctcatagagaaggagggaagccgttgagtcaagccataccgtcttcgcgtgttggtgttaagattaatgaatggtataaaatgattcgccagttcagtgttccggatgctgaggttctgaaagcggaggttgagcaggacattcagcagatggaagaagaccaggatttgctgatctattattctctgatgtgttttcggcaccagctgatgcttgattatttggagccgggacaaacatacgggaatcgccctacagtgacagagcttcttgaaacgatcgagacccctcagaaaaaactcacaggccttttgaaatattactctttgtttttccgcggcatgtatgaatttgatcaaaaagaatatgtggaagcgatcgggtattatcgcgaggcggagaaagaactgccgattgtgtctgatgaaattgagaaagccgaattccattttaaagtggccgaagcgtattatcacatgaagcaaacccatgtgtcgatgcaccatattcttcaggccttggacatttatcaaaaccatcccctatacagcattagaacgatacaaagcttgtttgtgatcgccggcaactatgatgatttcaaacactatgataaagcgctcccgcatttagaggcggcgctagatttggcaatggacattcaaaatgacaggtttatcgccatttctctattgaacatcgcgaacagctatgacagatcaggagacgatcagatggctgtagaacatttccaaaaagcggcgaaagtaagcagagagaaagtgcctgatctgcttccgaaagtcttgtttggattaagctggacattatgtaaagcgggccaaacacagaaggcgtttcagttcatagaggaaggattagaccatatcacagcacgttctcacaaattttataaagaattgtttctgttcttgcaggccgtgtacaaggagactgttgatgaacgaaaaattcatgatcttttaagctatttcgaaaaaaagaacctgcacgcgtacattgaagcatgtgcccggagtgctgccgctgtttttgaaagcagctgtcactttgaacaagctgctaagttttaccggaaagtgctgaaagcccaagaagatattctaaaaggagagtgtttatatgcctattaagaaaaaagtgatgatgtgtctggctgttactttagttttcggaagcatgtcgtacccattcctgacaaactccggcggcgttaaggaatcaacagatcgaaatacgacgtatatcgatcattccccttacaaacttagtgatcagaagaaagcccttagctagggctttttcttgctttacggaagacgttccattttccacatcacggcattccttctatttctaacgcaagacactcgaaacaaccaaaccatttgaggtataatggataaagtgaataacagtatttagattgatatatatgaaagagagtggaacatcatgggccgtaagtggaacaatattaaagagaagaaggcgtctaaggacgcaaatacgagtcgaatttatgcgaagtttggccgtgagatttatgtggcggcgaaacagggcgagcctgatccggaatccaaccaggcgctgaaggttgtgcttgagcgtgcgaagacttacagcgtgccgaaaaacatcattgaacgtgcgatcgagaaggcgaagggcggagcggaagagaattacgatgagcttcgttatgagggcttcgggccgaacggatcaatgattatcgttgatgcgctgacgaataatgtaaaccgtacggcgccggaagtgcgtgcggcgttcgggaaaaacggcggaaacatgggtgtgagcggatctgttgcttacatgtttgacgcgacggctgtaatcggtgtggaaggcaaaacggctgacgaagcgcttgaaatcctgatggaagcggatgttgatgtacgtgacattttagaagaggatgacagcgtgatcgtatatgctgagcctgatcaattccatgcggtgcaagaggcgtttaaaaacgcgggtgtcgaggaatttacagtagcggagctgacaatgcttgcgcaaagtgaagtaacgcttccggatgatgcaaaggaacagtttgaaaaattaattgatgcattagaagatttggaagatgttcagcaggtatatcataacgttgatttaggtgagtaaggagtgagcaggctgttatggcctgctttttttgtcccggaaattgttttagctgtatgtaggcggccgcctatacgatctataagatattctcatactctggactgtaacctatgtgaaggagagagtgaatatgactgatacaagacatatgtatggcggacctggttttggtcattatcagggctttggtattggccacccgggttatggcatgtatggaggccacccgggctttggcatgtatggaggctacccagatcacggcatacatggaggtgtcggcggctatccgggatatggaacgtacggaggatacggaggatccggcggttacccaagcggcggctatggaggctctccgggaactgtaaattatccgaacatgcaccatgaaaatgatggccatcaccactattatcaccatcatcatgatggaaaagataatcttcatcaccatcatcatgatggtcattatggccaccatcaccaccatatgggccactggggaaaagacggttataaataaagaagatgatggtataaagaggacactcttgcagatcaagagtgttttttatcttttttcttgactgttcagtctggaaactggtaacatttgtttcaggaggtgatcgtcttttggggaggaataaagaatttgatacggcacttgttcttcacagggcgatagaggtttttggagagtatggctacgaaggaacgtctcttcaggatctgctctctcatttaggcattgcgcgccagagcttgtatgatacgtatggcacgaagcgtgatttatttttgtccgctgtgaaaacgtatcttgaagggaaaaacactgccgttatggaaaggcttgaagcgccaggatctgtaaaggaagccattcgtgatatttttcaagaaggtgtcaatgctctgagggaccctgaacgggcgaaggcgtgctatatcattaacagcgcgattgaacagattccgcatgaccctgagcttgccctgtattttgaaagacaatccaagcagcttgaggacgctttttatcaggcgcttttaagagcgaaggaccaaggagaattgaatggcgaagatactgatatatctgcgcttgcccggtacctgaatcaaagcaggctgtctctgacatttgttgcgaaagtgacggctgatatggatcggcttcaggaccatgttgacgtgagtttatcagtgcttgattaacatgtggtaaaggattctttgcccatgtatgtatttttcggactgaatagtctagaaataaaaatgaggtgatgatgaatgttgatgaatgaatttgaaaaagcatgtgaaacattgagaaagtttatggcttatatgcttgagaaggacatgaagagctggacggagctttgggatgagaatgctgtatttgagttcccttatgcgccggagggatcaccaaaaagaatagaaggaaaagcggccatttacgattatattaaggattatcctaagcagatccatctttcttcatttaccactccgacagtgtaccgttcagcagactcgaatacggtgattgcggagtttcaatgtgacggccatgtgattgagactggactgccttatcgccaaagctatatcagtgtcatcgaaacgagagacggccgcattgtgcgttatagggattattggaatccgcttgttgtaaaagaggcctttggaggatcatttttgcaaacagaggagagtgggaaatgatgaaacagaatccgattttaatcacgggcgggactggcacagtcggcagccgaatcgccagccgtttaataaagctgggatacagagtgcgtattgcaagccgaaaaaagggcgcgcttgcaagtgcggagtatgtgtattttgattggaaggatgcctccagttttacgcctgctctagaacaggtaaaagacatctatcttgttgctccggttggtgtacttgatccggctccctatgtgcttccctttttaaaggaagcaaagcgtctcggcgcaaagcgggtagtgatgcaaagtgcgtctgttgtctccgagaacggtcccgtgtttggcgcgcttcaccaggcagtgcgcgagtttccagaatggacggtgctgcggccctcatactttatgcaaaatttcatcaatgtccagcaccgcatgtctattcaaacggaggggcgcatcacaacggcttcgggtgaaggaaaacttgggtttattgacgctgatgacatcgcagaaacagccgtcagggctttgattgatgatgttcctcatcaaacacatcatattctgacaggtcccgaggcgctgagctatgccgaagcggcggagatcattggagctgcggcgggacgccgggtggagcatgtcagcatttctcgttccgagctgcagcataaaatggaggcaggaggtttgcccgcggattatgcccattttatggcgaagcttgatgaggcaatcagccatggtgcggaacatcgggtaacggatacagtgaagcatgtgacgggaaaagaacctcgttcgctgtcagagtttgcggctgctcatgctgcatattggaaacactgacctcattttggactgaatagtctagaaagaccttcggcgcttccgaaggtcttcttattgaaaaagctaagtcgtgttttagtcataatcatgcctcctgcctcatacctattaaggtcattgtttttgagaaaggaggagccggaatgaaggatatgcagccgtttacgcctgtcaaatcatatacgccctttcacagccgttttgatccctgtccgcccatagggaagaaatattacagaacgccccctaacctttatatgacctttcagcctgagcatatggagcagttttcgccgatggaggctttgaggaaaggcaccctttggaaggatctctatgatttttatgaaaacccttatcgagggggagacgcacatggcaaaaaaggttgacgccgaatattatcgtcagcttgagcaaatacaggctgctgattttgtgcttgttgagctgagtctttatttaaatacacatcctcatgatgaagatgcgctgaagcaattcaatcaatattccggctattcaaggcacttaaaaagacagttcgaatcctcttacggaccgcttctgcagttcggcaacagccccgcgggcaaggattgggattggggaaaagggccatggccgtggcaagtataaggaggaatgcctgaatgtgggtgtatgaaaagaagctgcaataccctgtcaaggtcagtacgtgcaacccgacgctggcgaagtatttgattgaacagtatggcggagcggacggcgagctggccgcggctctccggtatttgaaccagcgttatacgattcctgataaggtcatcggccttttaacagatatcggtacggaggagtttgcccatttggaaatgattgcgaccatggtctataagttaacaaaagacgccacaccggagcagctgcgtgaagccgggcttggcgatcattacgtcaatcacgacagcgcgcttttttatcataatgcggcgggcgtgccgtttaccgcgagctatatccaagcgaagggcgatccgattgccgatttatacgaagatattgccgcagaagaaaaggcgcgggcgacgtatcaatggctgattgatatttcggatgatcctgatttaaacgattccctgcgttttttgcgtgagcgtgaaatcgtacactctatgcgcttcagagaagcggttgaaattttaaaagaagaacgggataaaaagaagattttctaataggcagattggcctctctttcatacacccttttacatacagagaaaatggtctgtttttgcagtttggtctgcattataatcaagggtgtgtaagcttactttttgattgggaggcctttatgtcagcttttaagattgagaacgaaacgattgcagatggattttacgcgtgtccggccgtctatgaggatgcagaatcgattaccgggttgctcgtccgaacagctgaatggctccgggatcggggttctaaccaatggagcggacttctcaaagggcaagatatacatgatatcacggggtcaattgaaaagggacatgtgtttgtgtttaaaaaagatgaagagcttgcggctgtcgtgatgctgctgcctgcaccgagcgagtgggaccggaagctttggggagacgatgggcatgaggagtccatttatttgcatcgcctcgcagtaagccgccggtttgcgggacaggggcttggagcccgcgtccttcagtgggcggagacgggcatacactttccgggaaaaacacggatccggcttgactgtgtcgctgataacgacgccctgcattccttttatcggcgtatgggatatgaattcatgggtgctgatgcgtccggatatcatttgtttgagaaagagattacggcagaataagcgtcctttgcagggggcttttttgtcttttctaaaagggagggcaggcgatgttgtggccaattttatttgtgacagggattgtgacggcttgtctgtttgctggcgtatccgttttgatgcggatgagatttcctgacaaaagtcggccggaatggatgttggccgggctgatcgtccttggtgtgtttgcgatctggtacagcctcgtgtatgtacgcggctgggaaggggctgcgctcggaatgcttggattcaatgtcattttcggagccattgccggatatttgatcgataaggccatccggcgttacaggaaaagataaggctgctgccgtctctcatcatgtcgaaattttcacagaccggcaggaattttctttcgaaaggagaaatacatattactttaaaatgaaagcgttttccaaagcgggaaggtgatgttgatgatacacagtgtgacaaatgggctgaatcgtttttgtacgtgggtgatgagactggcctatttgaatgtgctttggattttgttttctcttgcaggcctggttgtgtttgggctgatgcccgctactgccgcgatgtttacagtggcgagagaatgggcgaaggggaatacagatgccccggtgttttctgtcttttttcgggcgtttaaaaaggaatggcgggcatcacagatcctcgggcttatcgttgtgacggctgccctgtttctgtttgcggatatgcggatagcggctcagatggaccagcctgtgctcgtcaatgtattcctgagcattagtttgattttcgcgtttgttgtgctgtatgtgttcccggtattttctcattttgacgtaaaaatcagagaggtgctgagcatcagctttttcattgccttcagccgtccggcggtgacgcttttgatggcggcgggcgctgtcggtgtgctttgtctcgttctgtttcatgtcacgtttctattgtttttcagcgggagtttactcagcctgatcttaacgaagctgtcctttaaagcgtttcggtcaatggatcagcggcaggagaaagaaaaggcggcatgaagaaaagagttgctggctggtacaggcggatgaagattaaggataagctgtttgtgtttctatcgttgattatggccgtatcctttctgtttgtatacagcggggtccagtatgcctttcatgtgtatgatgagcagatttaccgcaagtcctcggaggtgcttcggatgtcttctgaaaggatcgaagacgagctgaagaagatagaggatgtgtcatatgaaatcattacggacgaacagattcagcgcatcctgagcatgcaaaatcgcgatgatacgtacgatcagtatcaaatgaagcaggagctgtgggatcagctggcgggatatgccagcgatgaaaagtacatcgattccattcatgtgattgatgcccgcggctcagagtattcagccggaagcagttcttcagatcttttgcagcaggagcaggaagaggtatttaagcgagcgaaagcgaaaaatggaagaaatctttggatgacgctcggcgggtcagatcctgtcctgatttcagcacggcagatcaggtcctatcaccagctgagtttgaacggcttgggcatggtgctgatccaggtcaatgtaaaacagatgattcgtgatgtgccgaaggattggggcgattcagtcggagacattatgattgctgaccaaggcgggaatttggtgtatacggcacatgcatcagcgcatgttcctgaggcagcaaaagagacgctgaagcaccccggttatgacttgataaaaaagaatggcaaacgttactttatttcttatcttcaatcatcctaccaaaattggagctactataacgttatcccctttgatcagatgttcgcgaaaatttcctttatgaaaacagtgatcggcacatgctttctcctctttttctgtgtggttttgcttttcggaaggaaaatcgccaacagcatcacggagccgattgaacagcttgtgaccgcgatgaaatcggtacagcacggcggcattgaagcaggtgtgtcgctttctctgccggaacatacacaggatgaggccggcatgctgaaccgtcattttactgtcatgatgaaacggattaatgagctgatggaagaaaatgtggaaaaacagctcatcattaaagaaaccgaattgaaagcactgcaagcccagatcaatccgcattttttatataacacgctcgagtccatcaattggctggccaaggcgaatcagcaaaagcaaatctcaaaaatggtggaatcgctcggttttcttctgagaaacagcatacatatgaaaaaggatatcgtgaccatacaggaggaggcggacattttacgtcactatatgaccattcagcgatttcgatttgaagagcgcctgaatttcacgttggatattgacgatgaggtgaagcattgcctcattccgaaactgacgctccagccgcttgcggaaaatgcgattcaatacgcgcttgaaccctttacaaggccatgcgccatccggattcaggcgaaaaaggcaaaggaatgtgtctgtattacggtcgaagataacggccctggcatggatggacggattcttgaatcaacgggcggaagaggaatcggactttggaatattcgcgagcgcatcagcctgacattcggagagccatacggcttgcggattcatagtgagcatgaaaaggggacgaggattgtgatcacaataccgtgccgaaatgaggtggtgtgatgtataaaatactgctggctgatgatgagaggattatccttgatggaatggcaggaatcattgagtgggagtcgcttggcgcctcattgatcggtaaagcgcagaacggacatgaagcatatgaaaagattgtacataagcagccgcatatcgtcatcacagacgtcaaaatgcccggcatggacgggcttgagttgatcaaaaaggtgtcagccatcagtccgtcggtgcaatttatcgtcctgtccgggtttggagagtttgagtacgcaaaggaagccatgaaatatggggtgaagcattatttgctgaaaccctgcaatgaacagcagattatcagctcgctggaggaaatcattgctgagctgaagcggcaagatgtgcacaaaaagaaaacagcccatctgaaacacgagctggaccatatccgttcctttgcagccgatcaatacttggaaggcttgatcgcaggtgtagcccagttgtctccgccgccttcacttgccggaaaaaagatccgcctcttgatcttaaaaggggaacaatctattgatgccacaaccagagaggcactcggatcggcactgacagcggtttgcagcagcggagaatggacagtgctcgccgtagaggagaacgccgctgaaaaggcggcggaggtttttgcggaccgcaagatggccatcagtcaggcgggagaactccggcacgcggggcagctgtttcgtgacacagctgaagcgtctggtgacctgcatgggagcgcagtgatttcaaaaatgatcaggcttattgccgacgagctcggaaatccgaatctgtccttaaaatgggcggcgaaggatatgctgtttatgaatcctgattatctcgggaagttatttaagcaggaaacaggcgagaaattttcacaatatgttacacgagtgcgtcttgaacatgcgataaaacagatgaaaatgaggcgggatgcgagtgtatcagaaattgctgaagaaatcgggtttggcgataatccgaagtatttcagtcttgtttttaaaaaatataccggtctgacaccgtcagaattcagaagaaaacagggaggcgcttccgcaggatagccatctctgtttttttgactttcgccactgttttttgagtgtttcgccctatccgaacgctttaaaataaaatgtaagcacttacattaaaaggggggattggtttgaagaagatttgttacgttctgttatcgcttgtctgtgtctttattttcagcgggtgttctgtgggcgaagaggcctcggggaaaaaagaagacattacgctcagaatcgcgtggtggggcgggcagccaaggcatgattatacgacaaaggtaattgaactttacgagaaaaagaatccgcacgtccatattgaagcggaatttgcgaactgggatgactactggaaaaagcttgcgcccatgtctgccgccggccagcttcctgatgtcatccaaatggataccgcttacttagcccaatacggaaagaagaaccagctggaggatttaacgccgtatacaaaggatggaacgattgacgtcagctcaatcgacgagaatatgctgtcgggcggaaaaatcgacaataagctttatggatttacgctaggtgtcaacgtgctgtctgtgattgccaatgaagatttgctgaaaaaagccggtgtgtctatcaatcaggaaaactggacgtgggaggattacgagaagctggcgtatgatcttcaggaaaaagccggtgtctacggttccaacggaatgcatccgcctgatattttcttcccttattatttgcgcacaaagggtgagcgcttttataaagaagacggcactggcctcgcgtatcaagatgatcagctgtttgtcgattactttgaacggcagctgaggctggtgaaagcgaaaacgtccccaacacctgatgaaagcgcacagattaaagggatggaagacgattttatcgtcaaaggcaagtcagcgattacatggaactactccaatcaatatttgggctttgcccggctgacagactcgccgctgtctctctatctgccgccggagcaaatgaaggaaaaggcgctgacattgaagccgagtatgctgttttccattccgaaaagctctgagcataaaaaagaggcagcgaaatttattaatttcttcgtgaataatgaggaagcgaaccagctgattaaaggcgagcgaggcgttccagtctccgacaaggtggcggatgcgattaaaccgaagctgaatgaggaagaagccaacatcgtggagtatgtagaaaccgcgtcaaaaaacatcagcaaagccgatccgccagagcctgtgggaagcgcggaggtcatcaagctgctgaaggatacgtcagatcagattctgtatcagaaggtatcgccggaaaaagccgccaaaacgttccgaaaaaaggccaatgagatattagagaggaataattgacgggaatggggctgacgcaatgaaaaaaagccggagtataagaaaagacaatctggcgggatatgcttttatttctccgtttatcatcgggttcctatgctttacggtgatcccgatgggggcgtccctgtttctgtccttcacgagctatgacttgtttacggcgccgaaatggatcgggctcgacaactttaaggaaatgtttacgggtgacgaaaagtattggcagtctctgaaggtgacgtttacgtatgtgcttgccggggttccgctccgtctcggcttcgcgctttttatcgctgtcattttaaacaatgcagcaaaaggaacggccatttacagaacgctcttttatctgccttcgatcatcggcggaagcgtcgccgtggcgattatgtggcgcaatatttttggcaatgacggggtcatcaatgcgctgctgttttttgtcgggattgaccaaaaaattctttggtaccagaatccgacaagtgcgctgtggacattgattctgctgtccgtctggcagttcgggtcgtcaatgctcatttttctggccgggctgaaaaacattccgtcttcgtatttggaagcggcaagtgtggatggggcaaatcgggtgcagcgtttcttcaagatcacgcttccgatcctcacaccgattattttctttaacctagtgatgcagacgatttctgcttttatgacatttacacctgcctatatcatttcgaagggcgagggcgggccgcttgacgggacacttctctattcgctctatttgttccagcgtgcgtttaactattttcaaatgggctacgcatcggcgatggcgtgggtcatgcttgtcattgtcgggctgattacgctcatattgtttaaaacatcgtcatattgggttcattacgagtcaaaggaggaatgacggatggagccggtcaacgagcctgtcagaaaagccccggtttttgaaagaaaaaaagccgggcgcgtcagtcccaaacgcatactgttccatgtttttacagcaacgctggcggtgttactgctgtacccggttatttggctgtttgtcagctcgtttaaagaaagcgccagtatttttacaacctcacattctctcattcccgacccttttattctcagtaactatgctgaagggtggaagggtatcgcgggacagccgtttctgacgtttattaaaaactcggcgatcattgtcggactgtcaacaatcggtgccgtcctgtcatcggctgtcattgcgtatggatttgcgcgtattccgtttaagggaaaaaaattttggtttgcgtgcatgatggggacgttaatgctgcctcatgaagtgttgatgattccgcagtatattatgtttgcgaaattagactggctgaattcctttaaaccaattgtcgttccgcaatttttcgggcatgcgttttttatatttctgatgatccagtttatccggacgattcccgaggagctggatgaagccgcgcgaatcgacggatgcgggcgctttgcctgcttttggcgaatcattctcccgctgattgcccccgcgcttgcgacgtctgcgattttctccttctattggaagtgggaggagctgattcaaccgcttttgtatttgaataagccggagctttaccctgtttcacttgcgctgaagctttttctcgatacagagtcggcttcgaactggggcgcgatgtttgccatgtcggccgtctcgttattgcctgtgattcttgtattctttttgtttcagaaatatatcgttcagggcatcagtacgaccggattaaaataaaaaggagtgttgcagatggcacagcttatctttgatgaagaaaaggtgacgtcggttattgaccggatcgtgaaacggacatttcagatggattttgcgtgggattggccgggcggcgtcgcgttttacggtgtggcggaggcctatgaagcgacggaaaacgaggaatatatcaatctgttaaaaacgtgggtggatgaacagctggaggatgggctgccgccgctttcgatcaacggagtttccattgggcatacgcttttgttcctccacaaggtgacaggtgatgacgtgtatttggaaacagcggccgagatggcggaatatgtgctgcataaggcgccgcgctttggcgagggtatccttcagcatacggtgaatgcggcagaatacgtattccctgaacaggcatgggcggatacgctgatgatggctgggctgtttatgctgagaatcgggcggatcatggagcgtgaggattattttgaagacggtctgcgccagtttcacggacatgaggatgtgcttcaggaccctgtcacgaatttgtactaccacgcctgggacaacaaagcgcaaaatcatctgtcggggatttattggggcagagcgaacggctgggcggcactcacgatggcaaaggcgctcccccttattgaggtgacacatccttcctttatgatcatcgacggatcgctcagagaccagctgagcgcgcttgtccggcttcaggatgaatcagggctgtggcatacgattttggatgatccggattcttatctggaggtttcggcatcagcgggtattgcttctgctctgatgtcgagcggaaagctgtatacaaaatatgtgcagaaatcgcttgccgccattttggatgcggtggaagaggacggacgggtcagcaaggtatcggccgggacagccgtcatgaaaaatgccgaaggatacaaacaggtgccttacaaacgaatacaaggatgggggcagggacttgcgctgacgtttcttgctgatgttttgaaaacgaaaaaacgcgtgtatcagtaaagacagcggcggggggaaagggatgaaaaaacagcctcaacagaaggaacgggtttctcgctggaagggaaggtatttcaaaagaaactttgtcttcattttgctgattgcctgtattcccggattgctgactggcggcgcaatctactttctttcgatcgacaaggtggagaaagagctgcagagatcgcatgaaacacaggtggcgcgtgaggtcagccgaatggatgagaagctgggagtgcttgaactggcactcacccagatggcctacgattcttcactgatgaacggattggccgagagggatttggagaaagactttacgttctcctatcaattaacgaaaaaactgtttcttttgcgggaccagcagccgctgatcgagcaggcttccatctttctgaacagcccccggccacttgtgctgagccctgaatacagcgctttgacagaacaggaggcgcttcgcaagtatcgctcgctacttgcctcagaccacagcatttattggaaacggtcgggaaatcaagcgatgctgatccagctcattccgggcgcggctgagaaaccgttcggcgcgatcatgctggcggttgatccgaaagaaatggaatcaatcctgcaaagcttgtccccctatcctgatggcagtgcgctgcttttagatcaaaatcaagaggtgctgtttcatgaaggggaaaaagattttaaaaagactttacttcaagagataaaaaaacagcctgctgagaaaggtcatattcagatggaatgggaaggcaaggtgtattctgtctcctttggagaaatgaaccggatgcatcagcaatggacctttgtgtcagcggcgcctctttcagctattacagcgccgatggtgtttttatcaaaagtgatcatcgtgatgctggtcatttgcatcggtttggcggtatgcatgacatggtatgcatcaaaaaaaatctatcgtcccattcagcatttgcttggcttgtttaccggtggagagaagaaagtatggcaggcgtccgggcaggatgaattcaagtggattgaaaagagatggcaggatctatcccttgaaagccggaagctccaagagcagctcctgcggcagacgccccatatgaaaaagagttttttgcagcacctcttgcagggggatttttactatgacaacgaggacagtctcagatctcggatggaggaggccggctggaacatcggcgaaaacgtgtttcatgtgctggatcttcaattgacaggactccgctgtgaaaaaagcatcttctgttgcgatgatgaacagctcgctgtgtttacactgactaatatcgctgaggaattggcggataaacgcgtttttcagctctccatacttgatatcggccggctttctgtcaccgttcttgtgatgaaaacaaacagctctgatctgaaggcgtatataacggagctggcacgccaatttggagatgtaaccggactatgcctgacctcgacattgagcagcaagacggagcgtgtcacggaaattccttctttatttcaggatgtgaaatgcggcaaatcccgcaggaagtttgctaaccgggatcaggtcattgatttgcaggccgacttccctcaggatgagcagttcgctccttattacccttttgagctggaaaaacaaattgttcaggccatccggctggaaagaaaacaggaagccgaggaactgatagatggatgtatgagggaactggcggaaaaggcggccatagacaggcatgtgcattccgccctgattcagctgttttcccgcattcaggaggatattttgcattccgggctcaatcctagcgaactgtttcagcatcggaacccgtttcttgatatttcagaattgcgcgaacctaatgaagcggcggcctggctgatggatgtagtggtgacgccttacctttccaagcttgagggcagaaaaaacagacagcaaaagcagctggcagaacgtgtgattgcgatgattcacgaacagtatatggcggatatttcattggaaagctgtgccgatgcgcttggcatgaattcatatacgttaagcaaggcatttaagcaagtgaccggcattaattttatcgattatgtgacccagatcagaatcgaaaaggcgaaagaattgctggtcaatacgaataaaaaaattcatgacgtgtcagaagaagtcggttaccgccacaattactttaaccggatttttaaaaaacaggtcggcatgccgccgggtgtcttcaggcaaatgtatcaggaaacgccgtgaaaggagagaacatgtgatgaagaaaccgattcaagtatttttagcgggagattccactgtgagtgactgcccgcctcatgaagcgccgatggcggggtgggggcaggtattcgggcaattgttttctgaagaggtagtggtgcacaatcatgccaaaggaggagcgagcaccaattcttttgtggaggaaggaaggcttcaagcaattgccgaacgcatcacacaaggcgattatctgttgattcaattcggccacaatgaccaaaaaccgcgggggacgaagccgtactccacgtttcagcaatttctcaccctgtttgcagatacggcacgcgaaaagggcgcgcatcctgtgttcgtcacatcggtgcagcgccgccgcttcgatgaaaacggacgaatcgagcattccctcggtgagtatcccgatgcgatgaaagcactggcgaaggagctcgatgtacctgtgattgatctgcttgcgaaaacaaaggtgctgtatgaagcatacgggccggaggagtcgaagcgattgttcgtttggtttcagccgaatgaacatccgaattacccggacggcattgaggacaatacgcatttttcggaagaaggtgcaatggaggttgcgaagcttgtggcagaaggccttgaagagatcggacttccgcttaaggaccaccttgtgagccgggagggaaaagaacatgtataaggaaggcacttgcttgtaccgcaatccgctccggtctaaaagcgatgtgaaggactggcggatggagggaggcgggcagatctcatttgacgatcacagcttgcacctgtcacatgtccaggatgaagcgcactttgtcttttggtgtccggaaacctttccagacggcatcattgtgacatgggatttctctccgattgagcagcctggactgtgtatgctgtttttttctgctgcgggaatgggaggcgaggatttgtttgatccaagtctccagaaaagaacgggaaaataccccgagtatcattcgggggacatcaatgcgctccacctgtcgtatttccgcagaaaatacgcggaggaaagagcgttccgcacctgcaatttaagaaaaagccgcggtttccacctcgccgcaatgggggccgatccgctgccttctccagacgacgctgattctccgtatcgtatgaagctgatcaaagacaaaggctatgtgcacttttcaatcaatggtctgcccattcttgagtggatggacgacggcagcacatatgggcctgtgttaacaaaaggaaaaatcgggttccggcagatggcccccatgaaagcagcttacagggattttgtcgtgcatcaagcggtgagaagatgaagacgactgtaacggatgcgctttatgcaggctgcgaagcggtggtgaaaatagcatggctcaacgggctgtggctgttgtttacacttttgggcggcgttcttttcggatgggcgccgagcacagccgcgatgtgtgccgttataaggaaatggctgatggggcaaaaggatgtcccgatatttccgttatttctcgatacctataaaaaagagtttctcaaggttaatgcgatcggattggcgttttgggctcttttgctcatattgtccgcgaactatcattatttttctgccagtacggattggctgtcctttgccgtaacaagctgcacgctgcttgcagggcttttgtatatcatcgcgctgatgtatgtgtttcccctttatgtgcattaccagctcccgcttcgcaaatatataccgcaggcactgctatttggcgccatgaggccgctgacaactggctgtatgctgatcgggtgcggatttgtcctttatttgctttatacgcttcctggcctgatcccattttacggcccgtgtttatttgggcttgtgttgatgttttttgctcttaggggatttcaaaagacggaggcccagcaccatcaagccgggtaacaaaaaaatgacaaatacgcaaaaaagtgcagtgtccgaaataggcagatgcaaaaaagtgaaattgaagacagctcacacagcgcataaaatccaatttaagtaagcgcttacaaataaatgagaaggagctgtctgatgattacacgaaggaaacgcatgtttaccgctgttacgttgctggtcttgttggtgatgggaacctctgtatgtcctgtgaaagctgaaggggcagcgcggcagatggaagcgctgaaccgggggcttgtagcggtcaagacggacgggggcatttttgtcagctggcggtttcttggaactgaaaacgcatctgttttgttcaatgtgtacagagacgggcaaaaactgaatgctgcgcctgtcaaaaccacgaactatgtggataaaaacggttcggcgggctcaacgtatacggttcgggctgttgtaaacggtaccgaacagccggcttctgaaaaagcctccgtatgggcgcagccgtatcattccgtcccgctggataaaccggctggcggcacgacgccaaagggtgaagcttacacgtacagcgctaatgacgcaagtgttggcgatgtggatggtgacgggcaatacgagctgattctgaaatgggacccgtctaactcaaaagacaattcacaggatggctatacgggtgacgtgctggttgacgcgtataaactggatggcacaaagttatggcggatcaatctcggcaaaaacatcagagcgggcgcgcactacacccagtttatggtgtatgaccttgatggtgacggaaaagcggaagtggcaatgaaaacggcagacgggacaaaagacggcacgggaaaagtaattggaaatgccaatgctgattacagaaatgaacaggggcgtgtgctttcaggccctgaatatctcactgtgtttcaaggttcaaccgggaaagagcttgtcaccgcaaattttgaaccggcgcgcggcaatgtgtcggattggggagacagctacggcaaccgtgttgaccgttttctcgccggcattgcctaccttgatggacagcggccgagcctgatcatgaccagagggtattacgctaaaaccatgctagttgcctataacttcagggatggaaagctgtcaaagctttggacgctggactcctcaaagtcaggaaatgaagcgtttgccggacaggggaatcacaacctgagcatcgcggacgttgacggggatggaaaagatgagattattttcggctcaatggctgttgatcatgacgggaaaggcatgtactcgaccggcttaggccatggggatgccctccatacaggagatcttgatccgggccggccggggcttgaggtgtttcaagttcatgaggacaaaaatgcaaaatacggcttatctttccgggatgctgcaaccggaaaaatcctttggggcgtttatgccggcaaggatgtaggccggggaatggctgctgatattgacccgcgttatccgggacaggaagtgtgggcaaacggttctctctactcagcgaaaggagtcaaaatcggaagcggggctccgtcctcgaccaacttcggcatctggtgggacggcgatctgctgcgggaacagctggacagcaaccgaattgataagtgggattatcaaaacggcgtatcgaaaaatgtgctgactgcatcaggcgcagcggctaacaacggcacaaaagcaacaccaacgcttcaggctgatctgctcggtgactggcgcgaggaagtggtgtggagaacggaggacagcagtgcactgcgcatttacacgacgaccattccgactgagcacaggctgtatacgctgatacacgatccggtgtaccggcttggcatcgcctggcaaaatgtcgcctataaccagccgccgcacacaagcttctttttaggagacggcatggcggaacagccaaaaccaaatatgtatacgccttaactgaaagggggaaggaacgggctgcgcgcagcccgttcccattaaaatgaaaccaaaaaagaggcaaatggaatacctgaccagaggtttgattgcggtaaagacagaacagggcgtgtttgtcagctggcgttttctcggcacggatcatgagacgacggcttttcacctttatcgggatggaaagcggatcacccgcgatccaatcgatgaaagcactaattttctcgatcaaaatggaacggctgactctgtttatcaagtggcggctgtcaataaaggacgggaagaaaagctttccaaggaagctcgtgtttggcaggaaaatgtcctggaggttccgcttgccaaaccggaaggcggtgtggcgccggacggaaagccgtacacttacagcgccaatgatgccagtgtcggggatatagacggggatggagaatatgaaatgatcctgaagtgggacccatccaattcaaaagacaacgctcatgacggttataccggggaggtgctcatagatgcctataaactggacggcacctttttgtggcgcatcaacctcggcagaaacatcagagcgggcgctcattacacgcaatttatggtgtatgaccttgacggtgacggaaaagcagaaatcgccatgaaaacagctgacggcacaacagacgggaaaggacatatcatcggtgatgagcatgccgattttagaaatgaacagggaaggattctgtccggaccggaatatttgacggtgtttaaaggagaaaccggtgaggcgctcacgaccgtggaatatgaaccgccccgcggcaaactggaggattggggagacggctatggaaatcggatggaccgttttctcgccgggatcgcttatttggatggggagcggccgagcctcgtgatggcgcggggctattatacgagagccgttctcgtagcatacgatttcagaaacggaaggctcaaaaaacgctggctatttgactccaaccagcagggccatgaagcgtacgcaggacaggggaaccacagcttgagcgtggcagacgttgacggagacggaaaagatgaaatcatatacggcgcaatggctgtcgatcatgacggaaccggcctgtactcaacggggctcgggcacggagacgcgatgcatgtaggggatctggacccgtcacgaaaagggcttgaagtgtttcaggtgcatgaggacgccacgaagccgtacggactgtcactgcgagatgccggaaccggtgagatattatggggcgtccatgctggaactgacgttggccggggcatggcagctcatattgatccaagctacaaagggtcgctcgtctggggaattgatccgccgggcaatgatggcatgtcgtatgggcttttcacgagcaaaggcgaaaaaatcagcgacaaagcgcccgcttcagccaatttcgccatctggtgggacggtgatttggtcagagaactgcttgatcatgactgggacggaacgattggcaggccaaagattgaaaaatgggatgctgaaaacggctgtctgaagacgatatttcagccggccggcgtgctgtccaacaacggcacgaaaggaaacccggttcttcaggccaacctgttcggagactggcgggaagaagtgatatggagaacggaagacagcagcgcgctccgtatctatacaacgacacatctcacccgccaccgcttttacacgctgatgcatgatccggtttacaggctcggcatcgcctggcagaataccgcctacaaccagccgccgcacacgagcttttacctcggaacgggaatgaaaaaaccgccgaagcccgccctgtacatagcgggaagtaaagcggaggcgccgctgtaggaggactaagggataagacgcaaaggctgaacgctacgacaagatgattaacgaacgggcaggacgaaccaatgctcaagcgctgtacgcaccggtctttttcaagggaagagctatccgtgatggaagctgtataaaaaacgaggaggaatgaaaaaatggcaaatcatatttatcttgccggcgattcgactgttcaaacgtatggagacagcacaaatcaagggggctgggggcagtttctcggctcgcatctgccggagcatattcaagtgatcaacagagcgatcgggggaagaagctcgaaaacatttgtggaagagggcaggcttcaggcaatcctcgatgtgattgagccggatgattggctgttcgtgcagatgggccataatgacgcgtcaaaaaataagccggagcgctacaccgagccctatactacttataaacaatatttaaagcagtatatcgcaggcgcgcgggaaaaaggcgcccatccgcttctcattacccccgtagcccgctttcattacgaaaacggcgtgtttttgaacgattttcctgattactgcattgccatgaagcagacggctgaagaggagaatgtccagctcattgatctgatggagaaaagtctcgctttctttactgagaagggcgaggaaaaagtgtacacctattttatgatttcagaagggattaacgattacacgcattttacaaaaaaaggcgcaaatgaaatggcgaaacttgtggcaaaaggcataaaggagctcggcctgccattgacagaatcgatcatcaaagaaaggtgaaaatgggatgagaaaactgtatcatggcgcttgctattatccggaattatgggatgaagagacgattcagcaggacattgacatcatgcgtgaagttggcgtaaatgttgtgcggatcggcgaatttgcctggtctgtcatggaacctgaagaaggaaaaattgacgtcggttttttcaaagaaatcatcgcccggctgtatgatagcgggatcgaaacgattatgtgcacgccgacgcctaccccgccgatttggttctcacatggccggcccgaacgcatgcatgccaatgaaaaaagagagatcatggggcatggctcccgtcagcatgcctgtacgaacaacccgtatttccgaaaaaaagccgccatcatcaccacagccatcgccaaggagcttggccggctcccggggctgatcggatggcagctagacaatgagtttaaatgccatgttgcagaatgcatgtgtgagacatgcttgcgcctatggcatgactggctcaaaaatcgctacggggtaattgagcgcttgaatgaagcttggggaaccgatgtgtggagcgagacctatcagacgtttgagcaagtcccgcagccgggaccggccccgtttctgcatcatgcctctctacgcactatgtatcagctgttttcgatggagatgatcgcttcgtttgcggatgaacaggccaaaatcatccgctgctattcagatgcgccgatcacgcataacggatcagtcatgttcagcgtggacaatgagcgaatgtttcagaatctggattttgcctcctatgacacgtacgcttcgcaggaaaacgcctctgcctttttattgaactgtgatttatggagaaatctgaaacaagggcgcccgttttggattttggaaacgagtccgtcgtatgccgcctcgcttgaaagctccgcttacccgcacgcagacgggtatttgcaggccgaagccgtatcgtcctacgccttagggagccaggggttttgctactggctatggcgacagcaacgttcaggcagcgagatttcccacggttcggttctcagtgcctggggcgaacccaccatcggctatcaaaaggtgctggcggttgagcgggcaagaaaggaaatcgagcctattattctatcgactgaacccgttcaagccgaggcggcgatgacttactctgacagagcaaaagcatttattaaaactgagcctcaccggggactccggcatcgttcgcttgtgacgcatttttatgaacgtattctcaacacggggattcaccgtgaccttattccggaaggcgctccactggacggctatcgcttgctgtttacgccatttgtgccgtatttgtcttctgaatttatcaaaaaagcttcggcattcgctgaagcgggcggcatctggatcaccgggccgctgacaggagggcgcacatgcgagcataccattcataccgattgcggacttggcgaacttgagaaaacgtcagggatcaaaacactttttacctttccgatgaatgagaacgtgaatacaggaaaagcgtttggcatcacggcgccactcggactatggagcgcggtgtttgacacagagagcggaaacacccttggcacggttgaatcaggaccgggggcgggccatgcttttctgacggaacagaattacggcgaggggaaaattgtcatgctgggatcgcttccatccgggaaagaaggggatgcgatgctggaagcgctcgtcaggcattatgcggaggaagctgttatttccagccggtcggatgtgacgcccggcacgatcgttgccccgcgcaaaggcgaaaacggccttgtgtggatcgttgtgaatatggatggaaaaggaggaagtgtgacactgccggaagcgggaacagatctgttgacgcaccgcttggaaaaggcggggaggctggcggtcggaccgcatgaataccgtgtgattcaatttgacaatcacagctgattctttgcatcgaatcagcttttttctatggagggagagaccgatgaaaaagatcaaatggttatcaggacagccaaaggtgataagtggtgtgacgtggggcgtgccatggaaaaaaggagaattaaaaaagggtgaccgtctggcgcttatgaatgaaaacgcggaaatgcgatatgtgcaaagcgaaccgttggcctattggccggatgggagcatcaagtggacgaagcacgcggcggtgtttggtggtcagagaaaccaaatatttacagttcgcaaaagagaagtgccgcagccaactgaatcgctcagcattcatgagacagagcatgatatccaagtgaatacaggagcactcgtttgtaccattcataaaaaaggatctgatttcattcaatcattgcagatcaatggaaagccgatcgccgcaggcgggaggctcgttgcgataagagaaacgagaaaggagtcggcggcggaaacggttcttttgcatgaaaggtctgtcagctttatcaaacgggcggcgattgagcagagtggtcctgtcaaagcagtagtcaaaatcgagggagtgcatgtgctccataaaacgtatgaggaatggctgccgtttgtcatccgattaacgttttatgccgggctgtctgagatcggccttgtgcacacgcagctgattgacaggagcggtaaacaagaattcataaaggggctcggcatcgaattcgacctttttttggagggagagccgtacaaccgccatttccgctttgcgggagagaaagggatgtacaaagaacccgcccagctgtttggcacacgtaaattcaatgaacgatatccgctttatgaaaaacaaatcaatggcgaaatgctgtctccagatgaagagcataaggaatggtttgcacatggcacacagaatgtggtttgggacgatgtcaagcttgtgcaagattccagcgatcattacagcctgtcaaaacggaccggaaaagattatgcgtgggttggaatgctgcatggcagccgggcgaaggggctctgctatgcgggcggaaaaaatggcggtgtggctctcggcctgcggtatttctttgagaaatatccttcagcactggaaatcacaggtcttgccggcagccgccccaaaatgactatctggctttggcctccggacggcgaagcgatggatttgcggcattatacaggaaacacccacgtggccagcgcgtatgaaggatttgatgaaatgcgctctgatccgacaggcattgcgaacacaaatgaaatcagcctggcgtgcttttcgcacatgccgtctgacgaagtccttaatgcactcgctgacaaatggcaggcgccgccgctcttgatatgtgagccaaacgtctattacgaatcaaaagcgctcggggtttggagcatcattgacacatcccatccgctcaaaaaagagctggaggaacagcttgacgccgcctttctgttttataaaaaggaagtagagcagcgcaaatggtacggtttttggcattatggcgatgtcatgcatacgtatgacccgatccggcatatgtggcggtacgatctcggcggatacgcatggcaaaacaatgagctcgttccgaccttatggctgtggcaggcgtttttccgctcaggcagagaggatatctttcgcatggcagaagccatgacccgccatacgagcgaaacggacagctttcacctcggtgaatacgcaggacttggttcacggcataacgttgtgcactgggggtgcggctgcaaggaagcgagaatcagcatggccgggctttataaattctattattatctgacgggtgatgagcggacgggagatcttttgacagaagtgaaggatgccgattatgccctcgtcaaaaccgatccgatgcgcgctttttacgagaaaggcaagcacccgactcacgccagaacgggaccggactgggcggcgttttgctcgaattggctggcggaatgggagcggaccgaaaatccggaatatctccacaaaatccaaacgggaatcaactgtctgaagcggctgccgctccgcttattatccggcccgacatttgaatatgacccggcgacctcgatgcttcatcacatgggagacggcattgcgggcggatatcatatgatcattgccttcggcgcgccgcaagtgtggatggagctggctgagcttcttgatgaccgggaatgggaggatatgctgagtgaattcggcgaattttacacactcagtgatgaggaaaaacgaaaaaaaagcggaggcgctcttcatgacgggcattttcactggccgatgttcgccgccagtatgacagcctacgccgcaagaaaaaaacaagatcctcatctcgccgccaaagcgtggaatcttttgctagaagataagctcagccatacgccgcttccgatcaaaccggagcgcatcgagacatggacgcagctagaggagcttccatgggtgacaacgaacactgtctctcaatggtgtttaaatgtcatagcggcgctggaactgatcggagattcccttccggcaaaaaaagaaacatcgggcaaaaaaggataacagccggaatttcataggagaaatggtgcaaaaaatgaagattgcaagaatttatgtaagcgctttatattgagaggggcaaaggggaaatgcaaattgaaaaaagggggacttacgcaacatgaaaataagaatgcgaaagaaatggatggccttgccgcttgctgccatgatgatcgccggatgcagccattcggaaacatccaattcagcaagcggttcgaaagatacgatcaaaattatggcgccgcttttatcgccggaaagcccgagtgataagagcccttcattaaaagcactcgaaaaatacacaggcaaagagattaaggtcacatgggtgcctgattcatcctacaacgacaaattcaacatcgtcatggcttcaggagagatgcctcacgcgattgtcattaaagataagtcagccggctttatcaaatctgtcaaagcaggggcgttttgggagctgtctccttatttaaaagactacaagaatttaagccaggcagatgaaaagattttgaagaacagctcggtgaacggcgaggtgtacggaatctacagaacgagggatctgatcagggcgtgtatgatcatcagaaccgactggctgaaaaatgtcggtctgaatatgccggaaacgcttgatgatttctatgaagtgctgaaagcctttaaggaaaaagatcctgacggaaacggcaaggatgatacgtacggcatggtcgtgccgaaatggatgggactcggcaacggaagcccatgggatgttctgcaaatctggttcggcgctccgaaccgctacggtgttgaaaacggaaagctgattccggattttacaacgaaggaatacatggatgcgctcacgttttttaaaaagctctatgatgagggattgatcaataaggactttgctgtcatggattctgcgaagtggaatgatccggttgtaaaaggaaaagcgggtgtcatcgttgatacaggctcaagagcgtctcaaatccaaagcgcgatggaggaggcggatgagtcgaacaaggatatcattgatatcgtcggctcgcttgagggaccgaatggcaagcgcaccttcccgacatctggttattcaggcatgatcgcgataccaaaatcaagcgtcaaaaccgaaaaagagctgaaagaggtgctgtccttcctcgataagatgaatgataaggaagcgcagattctcacgaacaacggagtgaagggccgcaattacgagctcaaggacggcgtattcacctcacttgaaaaaaacaacaaatctctcctgtatgagcatgaaggcttggcacagttcagcatgtcgattccaaaaagcgagtattacatcgaagaccagaaaaccaagctcttccagcatcgcaaggacatcataaccgaaggagaaaaaatagccgtctttaacccggctgagtcgcttgtatctgatgtctatacccaaaaaggagcccagcttgacaacatcatcctcgacgcgagaacacaatttatcattggagaaattgatgaaaaagggttcgatgatgcggtggagctttggaaaaaaagcggcggcaatgaactgatgaaggacttgaacaaattgtaccaatcgtcaaaataaaccgatgcgcctgccgttcggcgggcgccccggtatcacgaaaggagaacagatatggaaacagtgccgaagaagggagatgcacctgttctcaccgctggaaaaggcatcagctggatggctgcgctcaaacgggacaaatggctttatcttcttcttattcccggtctgctttatttcttgattttcaaatacttgccgatgtggggtgtgctgatcgcttttaaagactattcgccatatctcggcttctggaaaagcgaatgggtcggctttgattatttcaaagacttttttatgaatccggattttttccggctgctgcgcaacaccctcatgctggcgagtctggatcttttgtttgcctttcccgcgcctctcattttggccctgcttttgaatgaggtaagaaaggctgtgtataaaagatgtatccaaacctttatttacgtaccccattttgtatcatggacaattgtggtcagcatcaccttcgttttttttactgtcgatacaggtgtgatcaacaaaatgatcatgagcctgacaggtgagcagatttctttcttgtcggatgcagactggttccggccgatgattgtgatgcaaagcatttggaaagagacaggctggggaacgattctatttttggcagcgcttgctacggttgatcaagagcagtatgaagcggccatcatggacggagcggggcggttcaggagaatgtggcatattacgctgccggcgataagaagcaccattatcgttttgttgattttaagaatcggcagctttttgaatcttggctttgaacaggtgtatttgatgacgaactcactcaaccgcagtgtggctgacatcttcgacacgtatgtgtacatgatggggattacccaaggggcgtatagctacagcacggcggtcggtttgtttaaatcagttgtcgggattatcttgatttttggcgccaattacattgcgaaaaagtttgatcaggaaggattgttttagaggagggagaggtatggctgaaattcacacgatgcacaacaccaaagccggacgggtgtttgacgtctgcaacattctgtttctcggcggtgtcggcgcgattaccattttgccgtttttatatattatcgccggttcctttgcgacagaagcggaacttgcccagcggagcttctttattttcccgaaaacctttacacttgatgcttacaagtatgtgttttcgacaccgacgttccttcgaagcatgggcgtgtccatcttcatcacggtggttgggacggctgtacagctatttttcaccttcacgatggcgtatccgctggcgaagcggcatgtgaagggacggaatctgctgttgaatctggtgattttctccatgctgttttcaggcggcatgattccgacgtaccttgtcgtaaaatcacttggccttttggatacgtattgggcattgattctgccgatggcgattaatccgttcaaccttattattatcaaaaacttctttcagcagctgccgcgcgagctggaggaatcagcaaaaattgacggctgttccgaaatcggcgtcttctggcggatcgccctgccactgtcaaagccggttatagcgacctttgcgctgttttatgcggtcgggatttggaatgatttcttccacgctctcttatatatcaatgacagtgcaaaatggccgctgcaaatggtgcttcgccaagtcacgattttatcggatttaacggcgaccaatggcgatacgatgcaaaatgccgttccgccggagcagggaattaaactcgctgtcattgtcattgcaacgctgccgattttggcggtctatccatttttacaaaaacactttgcaaagtggatgctgatcggttcggtgaaaggctgagaaagggagtgtttcatatcagtacattagatcggattaagattgcctatatcggcggggggtcccaaggctgggccagaagcctgatgagtgatttgtcgattgatgaacggatgtcaggcacggtggcgctctatgatcttgattttgaagccgctcagaaaaatgaagtgatcggcaatcacagcgggaacggcagatggagatatgaggctgtttctactttgaaaaaggcgttatcagccgcggatatcgtcattatttccattttgccgggatcactggatgatatggaagtcgatgtccacttgcctgagcgctgcggtatttatcagtctgtaggtgatactgtcgggcctggagggatcatcaggggcttgcgtgctgtgccgatatttgcggaaattgcccgggcaataagagactacgcacctgaatcatgggtcattaattatacaaacccgatgtctgtctgtacaagagtgctgtataaagtgtttcccggcatcaaagcgattggctgctgccacgaggtattcgggacgcaaaagttattggcggaaatggtcacggaaaggctggggattgaggtgccgcggcgtgaggatatccgcgttaatgtgctcggcattaaccattttacatggatcacaaaagcctcttaccgccatattgacctgctgcctatattccgtgaattcagcgcgcactatggggaatcaggaggatatgagctggagggggaaagctggagggacagcgtcttttgttcggcacaccgtgttgcgtttgatttatttgaaacgtatggcgccatccctgctgcgggagacaggcatctggcagagtttcttcccggcccatacctcaaacagcctgaagtatggaaatttcatctcacacctatatcattcagaaaacaagacagagctgagaaacgacaagaaacagaacggttgatcgtgcaacaacgaggcgttgctgagaaagcttcgggagaagaaggcgtgaatatcatagtggctcttctcggattgggtgaactcgtcacaaatgtaaatatgccgaatcaaggccaggtctcaaaccttcctatacaagccattgtcgaaacaaacgcattcatcacaaggaaccgtgtccagccgattttgtccggagcgcttccgaaaggtgtggaaatgctggcggctaggcatatatccaatcaggaggcagtggcggaagcaggtttaacaaaggacactggcctcgcgtttcaagccttcctcaatgacccgcttgtcaagattgaccgcagtgatgcagagcagcttttcaatgacatgctccaatgcatcatgcaacgttgagcggagtttttccggtttagaaaggaaagcattgaccatactgatagtattatcaagaagtaggtgctatcaatatgggaaattatttaagcgttgcggtagaactggtctgcggtttaggcattttatttatcatcttaaagcttctcgggaaaacccaattttctcaaattacgccgtttgactttatctctgctttaattttaggagaattagtcggaaatgccgtttacgatcatgaaatcaaaatcaaagaaattatttttgcttcgctattgtggggcgtgctgatttatattattgaatttatcacgcaaaaaatgaaatcatcgcgaaagttcttggagggcgagccgaatatcgtcatccgcaaaggggagcttcaatataaagtattgaagaaaaataagatggacattaaccagctgcaaagccttttgaggcaagcggggagcttttcgattcaagaagtagaatatgcgattttggaaacaaacgggatggtcagtgtgcttccaaaatccgactttgacaaaccgaccaataaggatttgcaggttccttcgaagtctgtttccctgccaatcacgttaatcatagatggagagcttgtccgggataatctgaaggaagcaggtgtggatgaacagtggctgaagcaagaattgaaaaagaagaacattgataagacggaggacgtgttatttgcagaatggcataaaaataagccgctgtataccgtaacatacgaacaaagcagatcaacatgactcttagaaaaaagcttgcagcaaggcgcaagctttttattgattgtatgtcccttgtttgacagcacgtacatggtacatgctcacttcagtgctgatcagatagtcaggctttggtttgcctttgtttgctttgtggccggcgatatgcgcatcgcttttttcccattgcttccagcgatcctctgattcccagcgaatcatgacaacaacttcctcatcaccgcggcgtacgtttttctcaagcactgtcacatcaattaaaccttcttgtttttcaatgattccttcagcgctgaaacgttctatgactttatctgcaaagccttcttttaccgtcatttttctcaactgaacaaacattcgtctcactccaatcattctcacatatgaataattgtaaatgaaattcattctcattgtcaaagaaagcgcagggcggaatcgaaccgccgtgcgcaacagtttattcttttaataaaaacacatttccgtcttcgtccttaaattgaacgaaggtgccccactccatttgattgggctcaccgagaaattctacaccgtttgtcttcattttctcgtatgtaccaaagatgtcttcgcattcaaacacaatagaagccttcatttgctctgagcctttcatcatggctttcgggtaaatgactaaacgagtctcggctccttttggcgcaacctccagccagcttgcttcaggtcccattgggtggtccgctgcaatatcaaagcctaccttctctgtccaaaattgcttcgctttctgctggtcctcgacatatacagcaacagtgccaatttgtttgatcatagggaaacctccaagttgaaaagataataatactataacctgtttacggccgaagtaacataaaaaaatcagccgggaaaccggctgatttttaaaatgagcagctgacaacatcgatgtgatttgtgtctaaggcgaaataaacccagcggcgccgtgaggaatcccaataaaagccgccgacggatcttctgccaaggatgatcgggtaaaaccaaaatgagcggccattggttaaccaaacataggtaaatcggaaaaggcaaggacgaatggtgattggttcaactaacaaaacggctccttgagaaccctgcggttttgggggtttcgctggtatttgggaaggaggaggtccctgcggcgcaccgccgaagcctgggctggcaccgctgccaataccagggccggagccgccgccaaaacctggaacagcgccaccgccaataccagggccggagccgccgccagagcccggaacagcaccgctgccaatgccaggccatggatatcggtattcatattcaaaagcaggccaaggctcataaaaatgccccgcaaacatataaggatcaacataatacatgtgataacgtcctttctcattgtaaactgtacactgcagtttatgcgggcggactcttattggtgcattcgcctaaggatatgaagctggaatgctctcaaagagcagaatcatttgatttttctctagtcttattcacaattccgatttatcattttataatgaaagtgcttctattacgaaaaaggagacagaccgtgaatatcgatcaattattatatcaatatatcatagacaacactgcggatattactgagaaatggttcagtttgcgttgccagctaaaaggcgagctatattccgccagccatttaagtgaagaaacgaaaacacttttaaccgagcagcatacatttaccaatataacaatcgcaagcgcatttctggaggatcaaaccgattttcaagacaacatgacaaaatgggcggaaaacgttgcgaaaaacagggtagagcaggatgttcaagttcatgaggtcgtagaagccatatccaactctagaatctcattctgggacgcagtcgccacatttataaaagagaatcaggagatcgtgacaaatgaggatgcagaccgatggaaccgcattgtgaatcagtcgttcgataagctgattattgaattctctgagcagtaccaaaaattcatgctgatgaggctcacatctcagcaggaactgatctcagagcttggctgcccggtcatttccattgccgatggaatcgggatattgccgcttatcggctccattgatacaaaacgggcacaggtcattttagaaacagtgccggtccgctgtgtcgagagaaaaatcacaagcctcgtcgttgatctttcgggtgttccgattgtggataccatggtggctcagcaattgtacaacctgtctaaaacgcttttcttattaggcgtcaaagccgtattttcagggattcgcccggatgtggcccaaacatcgattcaattggggcttgattttagtgaatatgaaacgtacggcacgctgaagcaggcattagaaaatatgggtgtccgctgtattgttgaggaattggaagaaaacaaataggaagtttccaggcatatgattgtccgtcaccgggtgatcatatgcctttttgatttgaacagaaatcaccattgatttatcaaaaaaaacataatattataattcttataagaatactgtgaattaaaacctattcaacagggggaaggtcttttggtttcaaaatcaacgattgatccggaagtgattgaaaaaatcatcagctcgctggaaacactcgatttcggcaccgttcaaattacggttcatgattctcagattacccaaattgagaaaatagaaaagcaccgtttttcgctgaaaaggaaagaatcaaaatgataatgtaaagggcgtttgttttcattaaattctccttaaaacatatacatatttcatccaatttttatataatagacctttaagatcattttttaggaggatttttgacatgcaagctacggttcacgagagtaagcaatcgatcatgcaacgcattttgacagtctttgtctttactttgctgatcgcgactgtcggcctttttatcggccaatttgttcctgtcgctttgatgctgccgctttctattcttgaagtggtgatgattattctggccttctggatgcgcagaagaaaagcggtcgggtatgcgtttgtatatacattcgcgttcgtttccggcattaccttatttccgatcgtcagccattacgcttccatcgccggcgcctatgtcgtgcttgaagcctttggttctacatttgtcatttttgccgtcttaggcacaatcggcgcaaaaatgaagaaggatttatccttcctgtggtcatttctgctggttgcggtgctcgccctcgcagtggtagggattttcaacattttcagcccgttaaactcagcggcgatgatggcgtattccgtgatcggaaccatcgtcttttccctttacattttgtatgatttgaaccaaatcaagcaccgccacattacggaagacttgattccggttatggcgttatcgctgtacctagactttatcaacttgttcatcaacctgctccgcttcttcggcattttgagcagtgatgattaatgaaaaagcgtctgtcattggataggcgctttttgccatacatcaaaaaggcaggtggagtattggtgaaaaaacaaatgggcgcatatgtatctctggcagcagctatggcgatcgtcggcagttctgtcgttgtcggcaagctgatggtcgaacggattccggtctttctttcctcaggattgcgttttttgatcgcttctgtcgtattgctcatgctgctgttttgcattgaaaaagggtttccggctttgacgaaaaaagatgtgttcgtattactggtgcaatcattcacaggcgtgtttttgttcagtatttgcctgctgtatggggttcaatatacgacgggaacggaaagcggcattttgacaagcacaacccccatggtgatcggtattttatcctttttcctgcttagagaaaaaattgagaaaaagacgctgatcggcattttgctggcggtttgcggcgtaatggcgattaatttgtttggagccgggagccaagacgggacgccgcacgccttattcgggaacatgctgatcattgctgcagtcattggcgaagcgttgtttacattgatggccaagctgctatccccgcatatttcggcactggcgatttcgaccttcgtatcgctcttcggcttcctgttttttctcccgtttgctttgtttgaggcctcttcatttgattacagcgtgccgactgttttggattggtcgtatgtgctgtattacgcgctttttgtcactgttttggcgttttacttatggtatagcggggtgacgaaggtgccggcgggtgtatcgggcattttcacatccgttcttccggtctccgctgtcattttgtcaggcgtgatattgaaggagccatttgagtttgtgcatttcatcggcattgcatgtgtcatcggcggcatatttgttacggtcataaagaaaaaacagccggatgcgtatccggctgcagaagaaaagacgctatagcctgtccggatcggacgggttttttagtctttaaacacgctcagcctttcaaaaagatcaccaagcatcttcacgaacatgtctttttcctcgtcgctgtagttttccatgacagcggatattttgctgaaatggccgggcagaaattgctccaggcgtgctttgccttctgttgtcagttcaatgctgatttttcgtttatcctctgtgtgatgcctgcggctgacaaaaccgtctctcgccagcccgtccagcaggcctgtaatcgtcgctttcgtgacgtttgactgtttggcaagctctgtcggacttaacctatgatccttggcatcaaagagcagcatcagtattttgaattttccttctgacagccctcggccagcaaagtaatgctccatcacatgattcattttttttgaaatatcaaaaagagataaaaacaattcaagagagccggcgtcaatattggaatacgtttcggcgtgctctgttatatgcttatatttcggtaaatgttttaattccatcgcaagtagctcccgtacattcgttgtgacacgattataaaggagggaaaaccataacgcaacttggcttggagatgattgacagcttttcttgggacatagtaaggtaatatagttaggcgcctaactaatacatatagagctgaaaaggtggttattgatatgaaacatatgttaattgcaggaggcggcatcggcggcttgtcagcggccatttctctccgtaaggcagggttttccgtcaccttatgtgaagcggcttcagaaaaccgaaaaacaggtgcggggattcttcagccgcaaaacgcactggcggtgttgaaagaactgggcgtattcgaagagtgctgtaagcacggctttcaaacagaatggtttaaaacgtttgatgaacaggggaatttgctgtttcaagtcagtgaatcctttttagacgattcacttccgggacgcaataatatcctgcgcaaaacgttaaatgacattctcatgaagcatgccgaggcagtgggtgtagacatcaagtgggggaaaaaggttgtcgcttatcaagaaacagctgaatcggtcactgccgtatgtgaagatggagaaaaaatgcaggctgccattctggcgggctttgacggcattcactccgttgttcgcgatataatgctgcaaaaggagacggaaaaagagcatctcggcatgggagcgtggcgcttttatatcgaacttcctgatcacacatttgaggacgcgacattgatgtacagaagcggagacacacaaatcggggtggtgccattggcacaacacgctggctatgtcttcgtcctccagccttgcacgagcgattactgggatgaggaagatacccggtttgatagagtaaaagagattctttctggttttcgggggctggattttgtcacaaagcacatgtcaaaacagcatcctgtcatctttaacaaactggagcaggtcgccgtgcaggagccatggcataaaggccgcgttgtcatcggaggagacgccgcccacgccggcgcgccgaccctggcgcaaggagcggcaatggcgatcgaggatgccatcgtcctcgccgaagaactccaaaaccacgccgatcacgaaacagcattacaggcgtactacaaaagaagagccccacgagcgctcaaagtccagaacctatcatcggaaatcgtccgccgcgggctgaaaggagagccgggagcggaagaactgattggggagtgctatgcggtgttgagggaagggtattaaataggaaaagtccagaaagtgatttctggactttttagtcttgctctgttttattccttatccgctcaatcacctcatgcagcccctcaggcttataaaactccaccggtgaactgcctttctcaaacgaaatcgtctcggcttcaatcagcgcgacatagcgcccgtttacttttgcgagatgaatagaatcgccaaaatccgctagcaatcccttaatctctgtttctccgactttcattttcagctgggcctctggcgtgtgctcgatgatttgggcggaggcttcgatgacttgatgggtgtcgaggcgctcttggatttcccgtttttcgcttgcttcccaaatctcaatgtcgtgctcgaactgcttgagttcttcgctgttgtcttcaaatgtctcgtagacgtgctcctgtaccatgttcatgacctggtttttcatgatttccggcatcgattctccgtactcgacgaatttcagaaagtcctcaaaatagcgggcgtgcgaggcctggtggattttcagttcaccttcctcgaccattccttcctctggcatgtacgggtattggatgcttttcatgttttttgtcgtgatcgccatttcgacttttttaatgagagaagacgcgtcagagatgcgggcgaccttcggctcaaaatcacatttcataatgaagacaaatgactcgtcaaagtattttctcggcacggccgaagcgacgagaaacacgccgccgcgaaccgcgcttgtgtcaaggtacgtgcggacgaactgctcgctcagctcattgaagtcttcttttgtttccgccagacgcgcgcggttgaacatgttgtagtttgggttggaatcgagctcgtggccgggctcgacgataaaatggccgattttcgtcggcacctgctcggactgcggatggcggtctgctttccgtttaacgatttttttcagttccccgtcgagaaagtccttcagctcgctttcttcaaattcgcccgtatcaagggtctggaagtgcttgaactgcttgttcgcctgctcatctttgccttccacctgtatgacataaaaggataaaaaccgaatttcaaaatccatatataaactcaccttattcgcgtattgtacagcttctcaagtatagaaaaaacagcgatcatgcgtcaattgggagaacggaataatcatgaccatgaaagggaaatgtagtcaaatagaaggcatctcatacggaaaggaatggttcgatgaaggaaacaagcccgattcctcagccgaagacgtttgggccgctcggcaatttgcctttaatcgataaagacaagccgacgctttcgctgatcaaactggcggaagaacagggcccgatttttcaaatccatacacccgcgggcacgaccattgtagtgtccggccacgaattggtgaaagaggtttgtgatgaagaacggtttgataaaagcattgaaggcgccttggaaaaggtccgcgcgttttccggtgacggattgtttacgagctggacgcatgagcctaactggagaaaagcgcacaacattctgatgccgactttcagccagcgggccatgaaggactatcatgagaaaatggtcgatatcgctgttcagctcattcaaaaatgggcaaggctcaatccgaatgaagcagtcgatgtcccgggagatatgacccggctgacgctcgacaccattgggctatgcgggtttaactaccgctttaacagttactacagagaaacgccccacccgtttatcaacagcatggtgcgggcgcttgatgaagcgatgcatcaaatgcagcggcttgatgttcaagataagcttatggtcagaacaaagcggcaattccgccatgatattcaaacgatgttttcgttagtcgacagcattattgcagagcgcagggcgaatggagaccaggatgaaaaggatttgctcgcccgcatgctgaatgtggaagatccggaaacgggtgaaaagctcgacgacgaaaatatccgctttcaaatcattacgtttttgattgccggccatgaaacaacgagcggcctgctttcctttgcgacttactttttattgaagcatcctgacaaactgaaaaaggcgtatgaagaggtcgatcgggtgctgacggatgcagcgccgacctataaacaagtgctggagcttacatacatacggatgattttaaatgaatcactgcgcttatggccgacagctccggctttcagcctttatccaaaagaagacacagtcattggcggaaaatttccgatcacgacgaatgacagaatttctgtgctgattccgcagcttcatcgtgatcgagacgcttggggaaaggacgcagaagaatttcggccggaacggtttgagcatcaggaccaagtgcctcatcatgcgtacaaaccattcgggaatggacaacgggcctgtatcggcatgcagtttgcccttcatgaagccacacttgtgctgggcatgattttaaaatatttcacgctgattgatcatgagaattatgagcttgatatcaaacaaaccttaacacttaagccgggcgattttcacatcagggttcaaagccgtcatcaggaagccattcatgcggacgttcaggcagttgaaaaagccgcgtctgatgagcaaaaggagaaaacggaagcaaagggcgcatcggtcatcggtcttaacaaccgcccgcttctcgtgctgtacggctcagataccggcaccgcagaaggcgtcgcccgggagcttgcggatactgccagtcttcacggcgtaaggacagagacggcacctctgaacgaccggattggaaagctgccgaaagagggagcggttgtcattgtgacctcgtcttataatggaaaaccgccaagcaatgccggacagttcgtgcagtggcttcaagaaatcaaaccgggtgagcttgagggcgtccattacgcggtatttggctgcggcgaccacaactgggcgagcacgtatcaatacgtgccgagattcattgatgagcagcttgcggagaaaggcgcgactcggttttctgcgcgcggggaaggtgatgtcagcggtgattttgaagggcagcttgacgagtggaaaaaaagcatgtgggcggacgccattaaggcattcggactggagttgaatgaaaacgccgataaggaacgaagcacgctaagccttcagtttgtcagagggctgggcgagtctccgctcgctagatcgtacgaagcctctcacgcatccattgccgaaaatcgtgaactccagtccgcagacagcgatcgaagcactcgccatatcgaaattgcattgccgccggatgttgaatatcaagagggcgaccatcttggcgtattgccaaaaaacagccaaaccaatgtcagccggattctccacagattcggtctgaagggaaccgatcaagtgacattgtctgcaagcggccacagtgcggggcatctgccattgggccgtcctgtcagcctgcatgatcttctcagctacagcgtcgaggtgcaggaagcagccacaagagcgcaaatacgtgaactggcggcatttacagtgtgtccgccgcataggcgcgaattagaagaactgtcagcagagggtgtttatcaggagcaaatattgaaaaaacgaatttccatgctggatctgcttgaaaagtacgaagcgtgcgacatgccgtttgaacgatttttagagcttttacgtccgttaaaaccgagatattattcaatttcaagctctccaagagtgaatccgcggctagcatcgatcacagtcggcgtcgtgcgcggccctgcgtggagcggccgtggcgaatacaggggcgtggcttcaaatgatttagctgagcgccaagccggtgatgatctcgtgatgtttgtacgcacaccagaatctcggtttcagcttccagaagaccctgaaacgccaatcattatggtcggacctggcacgggagtcgcgccatttcgcggtttccttcaagcccgcgatgttttaaagcgggaggggaaaacgctcggtgaggctcatctctattttggatgcagaaacgatcgtgattttatataccgcgatgagcttgagcagtttgaaaaagacggaatcgtcactgtccacacagccttttcccgcaaagaaggcatgccgaaaacgtatgtccagcatgtcatggctgaccatgcagaaacgttaatatcgatccttgaccgcggaggcaggctttatgtatgcggtgacggcagcaaaatggccccggatgtggaggcggcactgcaaaaggcgtatcagtctgtccatggcaccggggagcaagaagcgcaaaactggctgagacatctgcaggataccggtatgtacgctaaggatgtctgggcagggatatagataaagaagactggagacatccagtctttcagcgtgtcggcaaaccctcgcattcgttgtcaggactgcgcttcggtgctcaatgcgaagtggatcaacggctaaattctcaggcgtcctgcctaaacgccgtcgtcatcacatcctgtgaatatccgctcctatgctcgtccttcctagacttcaagggttttcaatcacgctgaaaagatgacaaaatcctaaaatggttttcattttaggattttgtcaacaatctggaagactggagacatccagtcttttttgtcctttcgaaaaaatggtgatcgcgctaaacattgatgcatacaataacttcagtccgccggaagggcgggctgtctgcaaaacctatttttcgtttttgctagtttatgttattcttatactcggtatctatttcttttttcaaaggcacacatgacaaaagaaatcctttttttatttcggagaaaaaaatgtgaaacgaaatgaaggtttctttcgtccagtgattggtttccaaatggttgtaataaaaatgatatggtgcgtaacataaatattccggcttgccgcggtgtatttcttgttgtgtgatgccttgattttgtttggaaagaaggaattggaaggcaggatataaagagcaggtaaatatgaatgaagaacttaaagtgtttaagaaagtagaggttgccatgaagaaacttttttcttacaaacttagcttttttgtgctggctgttatactgttttgggcaaaaacgtatttatcctacaagactgagtttaatcttggggtaaaaggcacaactcaggagatcctcctgatatttaacccattctcaagcgccgtcttctttttaggactggctttgctggcgaaagggcgtaaatcagccattattatgctgattatcgatttcttgatgacatttgtgttatatgcaaatattttattctatcgtttctttgacgatttcttgacgttcccgaacattaaacagtctggaaacgttggaaacatgggagacgggattttcagtatcatggccggtcatgatattttctatttcttagatattatcattttgattgcggtattgatctggagacctgaattaaaagaatacaaaatgaaaaaacgctttgcatctttagtgatcctttctgggatcgcactgtttttcatcaacctgcactatgcggaaaaagaccgtccgcagctgctgacaagaacgtttgaccgcaattatattgtgaaatatttaggtttatacaactacaccatttatgacggtgtacagacggctcaaacagaaacgcaacgggcctatgcaagcagcgatgatttaacaagcgtcgagaattacacgacgtctcattatgcgaaaccgaacgccgagtacttcggctctgccaaaggcaaaaatatcattaaaattcacctcgaaagcttccagtcattcctgattgactacaagctaaacggtgaagaggtgacgcctttcttaaataagcttgcgcacggcggggaagatgtgacgtattttgataacttcttccatcagacaggccagggaaaaacatctgatgccgagctgacaatggataactcgatcttcggtcttcctgaaggctccgcgtttgtgacgaaaggcgaaaacacctaccagtcgcttcctgcgattttagaccagaaggaaggctatacaagcgccgtcctgcatggtgattacaaatcgttctggaaccgtgaccagatttacaaacatatcggatacgacaagttctttgacgcaagcacgtacgatatgtcggatgaaaatgtgattaacatgggacttaaggataagccgttctttactgaatcgattccaaagcttgaatctcttaaacagccgttttacgcgcatttgattacattgacaaaccattatccgtttaacttagatgaaaaagacgcgtctcttaaaaaagcgacaactggcgataacacagttgacagctacttccagacagcgcgttaccttgacgaagcgcttgagcaattcttcaaggagctgaaggaagccggcctgtatgacaactcagtcatcatgatttacggtgaccataacggtatttctgaaaaccataaccgagcgatgaaagagattcttggaaaagagatcacagattatcaaaacgcacagaaccagcgtgtgccgctgatgatccgcgttcctggcaaaaaaggcggagtgaaccatacgtatggcggcgaaattgacgtcatgccgacacttctgcacttagaaggaattgattctcagaaatacatcaactttggtactgacttattctctaaagaccacgacgatacagtggcattcagaaacggagacttcgtaacgccgaagtacacatcagtcgacaatatcatttacgatacgaagacaggtgaaaaactgaaagcgaatgaagaaacgaagaatctgaaaacaagagtgaaccagcagctgagcctttcagacagtgtcctgtacaaagacttgctgaggttccataaactaaatgatttcaaagctgttgatccgtcagactatcattacggcaaggaaaaagaaatcaaataagatgaaaaagagccttgagcgggcgcattgccttcgctcaaggctctttttttggttatacaaccaacttgaaaaaatagattccatttggtcaccaaggctggctttctctcatatcattacagtagattttgaaaccggattgaaatcggacaaattatcggggaaatgccttgatagattgtgaagatgtaccaggtttcgaactcaatattcatagagatgaggggtagagatgaaagcggtcattctctgcggcggaaaaggaacgagaatgagtgaagtcacgaatgacattcctaaaccgctcgccatgataggcggcaaaccgattctatggcatattatgaaaatttatcagtactacggagtaaacgagtttattctgcttttgggctataaaggagaaaaaatcaaggaatactttctcgactatgaatggaagcacaacagcctgacactcgacagctctacgggagaggtacagatgctgggacagcctgaaacgtggaaaattacgtttttggagactggggaagatacgctgacagccggaagaatcttgcaggcgaaagactatatcggtgatgaaacatttctgcttacctatggggacgggctggccaatatcaatcttttccatctcatcagctatcatcagacaaaaggtgctgccgcgactgtcaccggcattgacaaagtctcgcagtttggcaccttgacggttgaggacggcatggcgaaaacattttctgagaagacatcaagtgacggaatcatcaacggcggattcttcgttctcagtccaaaggttttcgagtatttgccgaaggacgggaacgcgatgttcgaagatgaaccgctgaagaaccttgccaaagacggggagcttgctgtgtaccgccattacggattttggacggccatcgatacgtataaaaatctcttagaagtcaacaaaatgtggaatcaaggacaacaagtatggaaggtatggtgaatcgatttgagtttctggaaaaataaaaacgtatttgtcacgggatccacaggtcttttaggaagctatttggtgaaagagctgatcgatcagggcgcaaacgttacggggcttgtcagggatcatgtgcctcaatccaatctttatcagggagaacatatcaagaaaatgaatatcgtgcggggctctcttgaggacttggctgtgattgaacgcgcgcttggcgagtatgagatcgacactgtctttcatctcgctgcacaagcgattgtcggcgtagcaaaccgcaacccgatttctacctttgaagcgaatatcctcggcacctggaatattctcgaagcctgccgcaagcatccgttaattaagcgggtcattgtcgcttcaagtgataaagcttacggcgatcaagaaaaccttccatacgatgaaaacatgccgctgcaaggcaagcacccgtacgacgtctcaaaaagctgcgcagatctgatcagccacacctattttcacacgtacgggcttccggtctgcattacgcgctgcggaaacttatacggcggcggagatttgaacttcaaccgcatcattcctcagacgattcagcttgtgctgaacggggaagcgccggaaatccgaagcgacggcacatttgtacgggactacttctatattgaagacgccgttcaggcttatctgcttcttgcagaaaaaatggaagaaaacaatcttgccggagaggcctttaacttcagcaatgagatccagctgaccgtacttgaactggtagagaaaatattaaagaaaatgaacagtaatctgaaacctaaggtgctgaatcagggaagcaatgaaatcaaacatcaatatttatccgcggaaaaagcaagaaagctgctgaattggacaccggcctacactattgatgagggacttgaaaaaacgattgagtggtatacggaattcttcaaaaagtaatgtgaaacgaggtgaacaagactgtgaccagcgcgtattgcaccgttttatcaaaaggaagattatatcaggcagtcgctttgtttaagtcgttagagcaagttgatcaagacagtcccatttttatactttgcatggatgaagatacgcaccgcgtgttacagaagctgaagatgaagcagctgaaccttgtgccggtggccgctcttgaaaatgaattgctgctgaagctgaaggaaactagagatcaaagtgagtattgctggacgatgaagccgatctttctgcaagctgtgctgaacagcaatcccgagctggagcgcgtgacgtatattgacggggacctctttttctatgcagatccatcgccgatttttgaaaaccagccggactgctcggtgctgctttcacggggggatattgtaatcccttcttttgagaaagagcagattgacatgctgcagcgtcttttaggcagatataattccgggtttatcagcttcaagcatgatgatgcaggcacggattgcttggagtggtggaaggaacgctgtcttgaggaatgcaaaaatgcaccgggtgaagggaaattcggtgatcagggctatttggattatatgtctgagctgtttccgaatgtgtgtgacattacaacacccggcgtgaacatcggccattggaattatggacagcatacgttttcctggaaagatggccggatcgtgctggaggatggcagtccgctgatcttttatcatttcagcggataccgaatcgtcagcatcaatgaaatcaaacagattcatgaaacaacccgcacagatctgccgtttgtgcatgaactgtatcaagagacactgccgcatatcattcagcacatgaaaacgttagaccctgaatttaacggttttgcttcaaaagatgacaacaaataaatgagtaaatacaggaagtgaaaatgaagtgaaagcaagcgttattattcctgcatataattcaaaggagcgtctttacaacagccttctgtcattaaaccagcaggagtgcgatgaagaattcgaagtcattgtagcggacaatggctctgaggacgggacgctctcgatgcttgagtcatttcaagctgattttccgctgatctttacacggattaaagaaaacaggggcattgcgtacggacgaaatcaggcgcttcgcaatgccagaggagacatcctgattttccatgacagcgatatgcttgcggcaaaggaccttgtggcaaaacatattaaagcccatgagaacgaagagaatctcgtcgtgtgcgggttgttttggaaacggatctacagtttttactatgaacggtttgaagaagaacataaggaacagctcgcaaagctcacaggtgaaatgccgaagaaagacaaacaaaagctgctggaggaagcggacatcaaaaacggaagctttcttgataaaagctttgacctcgataccgactttatagacgtgctcaagaagattttagatgagtacggcgatgacttgaaaggctatcatatgccatggcgcttttttatcacgaataattcctctgtgaaacgcaagcatgtggttgacctcggtttatttgacgaaggcattgtgcggtacgggtttgaggattatgacctcgggatcaggcttcatcaggccggattgaccttcaggcttcgccgtgatattgtcagtgttcatcaggaacatccaagcaattgtaagtctgtagacgatattcgggcaaacattgcctatatgtgcgataaatacaataacatccgctccttagacgttcatctcgcttttaatgggccgttcccgcctgacatgacgaacagaatcatggctgatattcaaaagctgctggaatcacagaaatatgatatgctgctgaatctgtttcttgagcttctgcatgttgttaaagagcgcaacattgatccggattggcgaaagaaatccccaagggtgacggcgaaaagctttgatttacaaactgtccgcaagcttctgcctaaggcgaagaaaaagctaggcgtgaacgattttgccaacgcactgtatgcgcttgtcaacgatttgctgcacgtggatcttagatcattggatgtggtataagtgagtacatttcatttttcaacgatagtgtcaaggacacatatctttaagctcatgcctatgattcattctctccatgagcattgcgatgattttcatttatatgtgctgtgtgtcgaccagaaagcgtatgaattgcttcagcacgtgccatgggagcatgtaacctttgtgcagctgcatgaaatggaagacccggagctgctgaaagcgaaaagcaacagaacgtttcatgaatattgctggacgttaaagcccgcctttttgtttcatgtgatgagcaagtgggatgacgctgaatactttgcccatatggatacggatctatttttcttttctgatccggcacgtatttttgcagaaaacccaacggcgtctctgtatttgactgatcatcgtaattcgccgcgcttcatgtcctactacgaccgaaccggacgctttaatacaggctttgtcggcgccggtaatacaaaggaagcatatgaagcggtgtggcagtggagacaggactgtattgaattttgcacggtcgaaatggatacggaacgaaagacatatggtgatcaaagatatgtggagaaatggccggagcagtttaaaggtgttcatgttgtcaaatccataggagccaatacagcgctttggaatatcgaaaactataaggtcgggcaaaaggacggccgcgtgtatatagatgaaacgccgctgattttctatcatttctctgggtttacgctggtgacagaaaaagagtttaatctttgctggtactaccggattgaagacgaagcgacaattaagatgatttatatgccctatatattaaatctgaaaagatggattgatgaaatacagtcggcgtttccggactttgcggatggctttatcccgaagcacgcagtgcctgacactcattttatccagctggattaaaaaaccccctgccgcctggcaggggttttttcagctatgccattctctcagcttctggtcacttggcaataggaaggcaaggatgccgaggacagggagaaaggcaatggcgatcatcgtcggggtcagtcccgcggcatcaatcagagcgcccagcgccacagcgccgattgcgcccatcccgaaggcaagcccgacggttaaaccggacattgtgccgatttttccaggaactagctcctgtgcgtagacgaccgttacagaaaagctcgacatcagaaccaagccaatcaatgcgagcacgccgtaggcgagaaccgggccggcaaatggcagcacaatcgccagcggcgccgagcataacagcgaaccgaggataacgaagcgttttccaaaacggtctgcaagcgggccgccgagaaacgtgccgatcgcgccgaacagcaagaagacaaaaatatagctttgtgcctgctgaatgcttacgtgataggtatccatcgcgtaaaacgtgtaaaagttaccgatcgcactcgtataccaagaacgagcaaaaatgagaaatataataataataagagcagatacaacagatttggtgatggccgtgttttcagccgttttcttttgcttgcctgatttctgggcaaggctgccgagacgtgaggcgtaccatttcgcaatatacatgagaaacataacagcaagcgcggcgacaagcgtgaaccaaacagcgccgaattgcccgagcggcacaaggatcagcgcggtgatcagcggtgccatcgcctggcctgagtttccgcccacctgataaatcgattgggcgagcccgcgttttgtgccggcggccatatacgccacacgggagccctccggatggaaaatggccgagcctaatccaatgaaaaacacacagcataagatcgttatgaatgacggggcaaatgcaaggcccaaaatgccaagcatgctggcggtcaaaccgactggcagcgcatacggccgcggccgtttatcggtataccagccgacaacaggctgcatgacggatgacaccatgtttaatgtgaaagcaatgatgccgagctgtgtaaacgtcaggctcatggagcgttccaaaatagggaacatggccggaatcacagcctgaagcgaatcgttgagcatatggcaaattccgataataatcaaaatcggatacaccgtggtgcctggtttttgaactgttttttcttttaacggggcggcgatagccattgagtctcctccttacatatataaccaaagcataccaccatattattcataaggtgaagaatttatcaagaggaaaaaagattcttatgaaagaaataccgtcagcctgattagcagctgacggtattttcgatattcaaaatgtgatatagctcttcaagcttacgaatctcataggttggtatgatctctggcacattcggcttcatgtcagggttcatccagcaagtatcaagcccggcgagctgtccgcctttgatatcagcagttagtgaatccccgatgattaatgtgtgctctgctgaaaattgaggaatccgttcaaacacgtaattgaaatattccttcatcggcttttggaagccggtgtcttcagaaacgaaaatgtccttgaagaatggaaataatcctgaatcacggagacgcttatattgtgtgtgagacacgccgtttgtcacgatgtacaaatcaaactgttgctgcagatttgagatgagatcaaatgcaccgtcaataagctgatgtccttcttcaagaaagcggcggtatttttgctcaagcaaagcgccgtccgcttcgtaaccgtactccttgagcaaagcggaaaaacgtgtgtttacgacttcatcccgtgtcatcttaccttcttcaaaggctctccagagaccttgattgatggttttatactgcgccttcatgtcatttgttaaaggaatgttctgatcttcaaacagcaaacgcagggctaaagcttctgccgcttgaaaatcaaggatggtatcatctacatcaaataataaagtgcggtatcgcttcatctgtgtgtctccctttctcatatgtattcaaagtatagcacataaaaaaaggaaaaagccggcgggtgaggcaccgccggctgaaaagagattatttgtttaataagctgtgttttctcgaatataggaagtaaaccagcgttccgacagcgatccagatgacaaatgaaagccatgtgacgccgggaaggctgtacatgaaccaaaggcagatgcctgcgctgataatcggcacaaccggaacgaatggcactctgaaggacgctttgatttcaggatgtttctttcttaacacaatgacagcaatggaaatgaccgtaaacgcggcaagtgttcccatgttcaccagatgggccagcgttccgaggttaataaagccggcgattcccgctgcaacgatccctgtcagccatgtgttgcggaacggggttttaaatgacggatgaacctttgcgaacaatccaggcagaaggccgtctctgctcatggcaaatgtcaagcggacctgtgcgtacagcaaagcgagcatcaccgtcgtaatcccgataatcgcaccgacagaaataattccggcaacagcgtcctgtccgacgaatttcagcgcaaaggatacaggatctccgacattcaatttggcataaggcatcatgcctgtcagcacaagcgataccgcgatgtacagaaccgtacagacggctagagctgaaataatgccgacgggcatgtttttttgcggatttttcacttcctctgatgcgttagaaaccgcgtcaaacccaaggtacgcgaagaatacagtggcagcgctaagtatgacgcctttcatcccgaatggcataaaaggagaccagttatccggtttcacatagccgatgccgacaataatgaacaataatatgatcgcgattttcatcagtacgatgacgttgttaaagcgtgtgctttccttgacgcctctgctgacaatcgcagtgatgaggagaatgatcaccgcagccggaaggttaaatacggcgcccgccgtgcttcccggcgctcctgtcagtgcagccggaatatgaagattgaagccggcaagcagtgattgaaagtatgaagaccagccggtggcaaccgccgacagtgcaatgacatattcaagcatgagatcccatccgatcaaaaaggcgagcagctctccaagtgtcacgtatgagtatgagtacacgcttcccgaaatcggaatggaagacgaaaactcagcataacagaaagcagccagcgcacaggcgagccccgctaaaataaacgatatgatgagggcgggacctgcaccggtcgctgccactgttcctgtaatgacaaaaatccctgtaccgatgacacaaccgataccgagcaaggttaaatcaaatgcgcttaacgtacgggcaaggctttttgacttgctctgcgcactcaatgtttcaagcggtttttttctaaataatgaactcatcaaaagttcctcctagaaatattcaaaatattctaatcattatatgcagttcttgttgtattatattgtcgaaatttgacgtagtcaataaaatatttttctgctttaaatgatagaagcgaaacagcgttgtcgtatcataggatagtaatttttactaatcgtatattcaattttatgcaagatgaaccgatagaaaaaatagattcgcccatattttgatttgcggttataaaggagatgctgaccatgtttcaatatgaagagttgaataaacagtttatcggcgggaaatggcaggagggcagcagcccaaatgtattggaaaacaaaaatccttatactcaaaaaacattcacaacattccgtaaagcgactgctgacgatgtagatgaagcgtatcgggcagcggcgctggcaaagaaaaaatgggatgcggtcaacccgttcgagaaaagaaccattttagaaaaagccgtcacgtatattgaagaaaatgaagaagccattatttatttgattatggaggagctaggcggtacaaggctcaaagcagcttttgaaatcggtcttgtcaaaaacatcataaaagaagcggcaacgttcccaatccgcatggaggggaaaattcttccgtcaacaatagatggcaaggaaaacagattatatcgcgtgccggcaggcgttgtcggtgtcatcagtccgtttaacttcccattctttttatctatgaaatcagtggcgcctgcactcggagccggcaatggcgttgtgctaaagccgcatgaggaaacgccgatttgcggcggaacgctgattgcgaaaatttttgagaacgcgggaattccagcggggctgctgaatgttgttgtcacagacattgctgaaatcggcgacagcttcgttgagcatccagtgccgcggatcatctcatttaccggttctacgaaagtcggcagctacatcggacagcttgcgatgaagcattttaaaaagccgcttcttgagcttggcgggaacagcgccttcatcgtacttgaggatgcagatatagaatatgcggtcaatgcggcggtgttcagccgatttacacatcaagggcagatttgcatgtcagccaaccgcgtgcttgttcattcttctatttatgacaagttccttgagctgtaccaggcaaaagtggaatcgctgaaagtcggcgacccaatggaccctgatacgattatcgggccattaatcaacagcagacagacggacgggctgatgaagactgtagagcaagcaattgaagaaggcgctgtaccagtgaagcttggcggatttaacgggacgatcgtggaaccgacgatcttaaaagacgtcaaaccgttcatgagcattgccaaggaagagctgttcggaccagtcgtctcctttatgaagtttgattcagaagacgaagcggtggatatcgcaaacgaaaccccgtttggcttgagcggtgccgtacatacgtcaaatcttgagcgcggcgtggcttttgcgaaacgcattgaaacaggcatgattcacgtcaatgacacgaccatcaatgatgaaccgaatgtagccttcggcggtgaaaagcaatcaggcctcggccgtttaaacggtgagtggagcctcgaagaatttacaacgctgaaatggatctcggtccagcacgaaaaacgcagcttcccttattaatgaaaaggagtgaatggaattgaccataaatacggaaaaagaaaccgcagatattctggacgcatttatcaaagtagccccttatttaaacagcctggttcaggatgatattacaatcggcatttatgatacggaaaaactgctcgtgaatataccggccaaaaccttttcgctgaacgtaaaagccggcgatccgctgcaggaaggggatatcatcacagatgccatccgcagcaatcagaagaagacgagcatggttccgaaagaattgttcggcttcccattgatcgcgcgtgccatcccgctgcacgacgagaatggaagagtcattggaggcgtcggcctcggaacgagccttgaggagtcgtcaaagctgcatgatgtcgcggaaagcttatcagctgttgttgaacaaacagccgcggctatttccgacatttctgaatcaattaacgggttttcaactcaaatgtcgggcatttcctctcaggcgaaaaaagtaagcgaaagcgccggtgaaatcgccgatatttcagtaactgttaaaggcatctcggaccaaagcaatctgctcggcttgaacgccgcgatcgaagcggcaagagcaggggagtccggaaaaggattctctgtcgtcgcagatgagatcagaaagctagcgacgcattcaaaagaaaatgtcggccaaattgaccagattacgaaaaaaatccacagcctgctgaaagggctggaggaatccattgagtcgattaaccagcatacagacggacaagccgctgctgttgaacaaatttccgccacgatgcaggagatttcaggaagcgcgcagcatcttgcgaaaatggccgaaaaagcgcttgaggaagagtaagagaccggggacaaacatccccggtctttttcttatcctgcatttccatgaaattcgtctgacgttttactagttttattccagcggctgatttaaaatgtacacatgaacttacgtgaggattgataggaaccatgagcatattaaaagcggaaaatctttataaaacatacggagataaaacattatttgaccatatctcctttcatattgaagagaatgagagaatcggattaatcgggccgaacggaacaggaaaatcaacgctgttgaaagtgattgccggcttggaatctatcgaagaaggagaaatcacgaaatccggaagcgtgcaggtcgaatttcttcatcaagacccggagctgcctgcggggcaaacagtgctggagcatatctattccggtgaatcggctgtgatgaaaaccttgcgtgaatatgaaaaagcgctgtatgaactggggaaagatcccgaaaatgaacagcgccagaaacacctgctggcagcacaagcgaaaatggacgcgaacaatgcatgggatgcaaacaccttggcaaaaaccgtattgtctaagctgggcgtcaacgacgtaacaaaaccggtcaatgagctctcaggcggccagaaaaaacgggtggccattgccaaaaacttaattcagcccgctgatttgctcattttggacgagccgacaaaccatttggataatgaaacgattgagtggcttgaagggtatttaagccaatatcccggcgccgtcatgctggtgacgcacgatagatatttcttaaaccgtgtcaccaaccgcatttatgagcttgaaagaggcagcctctacacttacaaaggcaactatgaagtgtttttagaaaaacgcgcggaacgggaagcgcaggctgagcaaaaggaaacgaagcggcaaaacctgctgcgccgcgaactggcttggctcagacgaggagcgaaagcccgctccacaaaacaaaaagcgagaattgaccgggtagagacgcttaaagagcagacaggccctcagtcatcaggttcactcgattttgccattggctcgcaccgtctcggaaaacaggttattgaagcggagaacgtcatgatcgcttatgacggccgcatgctcgtcgaccgttttaatgaacttgtcataccaggtgaacggatcgggatcatcgggccgaacggcatcgggaaaacaacgctgttaaatgcccttgccggccgtcatacgccggacggaggcgatattacgatcggacagacggtcagaatcggctactatactcaggatcatagtgaaatgaacggtgagttaaaagtcattgactatataaaagaaacggcggaggtcgtaaaaacggcagatggcgatatgattacagctgaacaaatgctcgagcgtttcctcttcccgcgttcgatgcagcagacgtatatccgcaagctgtccggcggggaaaaacgccgtttatacttgcttcaggttctcatgcaggagccgaatgtcctgtttctcgatgagccgacgaacgatttggatactgaaacattaagcgttcttgaggattatattgaccagttcccaggcgtcgtcatcaccgtatcccatgaccgctatttccttgaccgcgtcgtcgaccgtttgattgtatttgaaggaaatggtgtcatttcccgctttcaaggctcctatagcgactatatggaggagtcaaaagcgaaaaaagcggccccaaaaccggcagctgaggaaaaaacggctgaagccgagccgaagaaaaaacggaaaaagctttcttacaaagaccagttggaatgggacggcatcgaagataaaattgcccagctggaagaaaagcatgaacagcttgaagctgacatcgccgcagcaggcagtgattttggcaaaatccaagagctgatggccgagcaggcgaaaacggcggaagagcttgaggctgcgatggaccgctggacagaattgtccctcatgatcgaagaactggaaagctaaaaagcgtggccgcagcaggccgcgctttttttcacataatggacaaaaacgaaccggcctgcttatgttaggataaagttgtgtgtcagcggcacatggaaaactaacggagatgatgaagtatgacatgggcgatcgtgatgttaattctcatgagtctggtgaaaatcgtattaacctgtcttcctacaggcgtcatagaatggctgctcggcaaatttgaagtgcacgccaagctgagtgacgaaaatgcgagtctctctctagatggaaaacgcctcgagggtgcagagaagcagaaagtgattgatcaatttaacgaagctatcttcctggaaaaatattatatctatccaggtgatgaagagcgttatttacatccggaaaacggcggcacgcctctggtgatagatacaaaaaaaggaaaaaaagacgtgaagctgttcgtgtaccgctacgacgaccatatcgacgtcgtgaaacagtacaagaagaaagtgatcgcgtatcgagtgctttctgaaagccttcaaaaagagtctctgtcagtggcgggaagtttagcttaaacaggaaagtgaaagacgggtgctgtatgctgctcgtcttttttattgttttttaaaacttaacgtttacgttaaggttcaaaaggtgtataatggtaacagaaacggcgaagggggatttaccttggaatggatgaagattgatcaagtggccaaaagaagcgggctgacaaagcggaccatccggttttatgaagaaatcggcttgattccggcgccgaaacggacagacggcggtgtaaggctttattcagaggatgatatggaggagcttgagaaagtcatcagcacaaaagaggtgctcggtttttcccttcaggagcttcagcatttcatggaaaccagccgccagctagagttaaacaaagaggggtatttgttgtcactggatcctaaggaacggaaagaaaaactggaggaaattcaggaaaccctgaatcaccagctggatttgattgatgagaaaatccgcacattccaaagctttaaagaacgcctgcagggcatgaaaaataaagcggaacgcgccattcaatcaatcgaatgaaaagtttgttaaacgctatttttgtagcgtttcttttaatggaataaagatggaggttaggtcaaatggataagacaacacaagtgaatcagaaaacgggtttgctcagccagccaaaagcggtatgggctgtcgcgtttgcctgtgtgatttcctttatgggaatcgggctggtcgatccaattcttccggccattgccgcacaactacatgcttcacctagtgaagtatcactcttgtttacaagttatttgcttgtaaccggatttatgatgtttttctcaggagccatttccagccgcatcggcgcgaaatggacattaattctcggacttatttttattattgtgtttgcggggcttggcggcagctcaagctcaatcgctcagttagtcggctatcgcggcggctggggattagggaatgctttgtttatttcaacagcgcttgcggtcatcgtcggcgtgtcagtcggcggcagcgcccaagcgattattttgtatgaggccgcgctcggtctcgggatttctgtcgggccgcttgcaggcggagagctcggaagcatttcatggcgcgcaccgttttttggagtatctgtcctgatgtttattgcgttaatcgcgatttctttcatgcttccgaagctgccgaaaccggcgaaacgcgtcggtgtgtttgatgcgatgaaggcactcaaatataaaggcctgctgacaatggcggtatcggcattcctatacaactttggattttttattttgctagcttattctccgttcgtactggatttagatgaacacggtcttggatatgtcttcttcggctggggccttctgctggcgattacgtcagtctttacggcgccgctcgtgcacaaagcgctgggcacagtgcgttcgctcgtcgttctctttatcgcctttgcggccattctcgttattatggggatctggacagaccatcagactttgattattacatgtatcgttgtcgctggtgctgtcctcggtatggtgaatacgatcatgacaaccgctgtgatgggttctgcgccggttgaacgttcaatcgcgtcttcagcctacagctcagtccgcttcatcggcggcgcgctcgccccgtggattgcaggaatgctgtcagaacactttactgcaagcacaccatatacagtaggcggaatcgtcgtttttgtcggcatgcttgtccttctcatgggacgtaaacatcttgctggaattaaggcggggcattaataacgaaagacactgcacagatgcagtgtctttttttaatcgtggaatctccccattactaccgtattgtagtgatttccgtcagaaagcaatttctccttttttaagattccttctgcttcaaatacgtatgtttttatagtgaaatggctctttaatttgtttccaggatattcagtgagatttttttaattccgttggcatccgcttcggtcaggcattgatgcggctgggatttatcttgcagaagctgagaatgtgtccgttcatttacgattgccatttcaagtgatggttcatgctgtagagggaacgtttgccatggataaggcaaagcctgacgaatatgatcataaatgtttagaaacgctctatcaatacatacacagcgtcatgaaaaacagcttttctcggtcgagtggtttaccgcttgggcagatgaggaggattttgagctgtctgccaaaaaagagctgacccttgatgaattcacatctccattgcagctcattttaaaagacagagagcttttgagaatcgttaagaataaacggcagtaaaaaacccgcccttcagcaggcgggtttttttataaattaaagcactttcgtcgtccaagactcgcagttccatgtttctgtcgcgatatccatataaaagtctggctcgtgggaaatgagcagaatggagcctttatattctttcagagcgcgcttgagctcttccttggcatcgacatccaagtggtttgtcggctcatcgagcaccagcaggtttgtttctgagttgattagcttgcacaatctgactttcgctttttcgcctccgcttaatacggagacgcggctttcgatatgctttgtcgtcagcccgcattttgccagagcggcacggatttcatactgcgtataagaagggaattcgctccatacttcttcgatgcacgtattgttgtttgtttccttgacctcttgctcgaaatagccggtatagatgtgctcaccgcgttcaacagagccttcgagcggctggatttcaccaagcaaacttttcagcaatgtcgtttttccgatcccattcgcgccgtaaagggcaattttttggccgcgctccatgcggaggttgagcggacgggacagcggggaatcgtaaccgatcacgagatccttcgtttcaaaaatcagcttgcctgacgttctcgccggcttaaagtggaattccggctttggcttttctgccgcaagctcgatcatatccatcttatcgagtttcttttggcgggacatcgccatgtttctcgtgctgacacgcgctttgttgcgggcgacgaaatccttcagctccgcgacttcctgctgctgctttttgtaggccgcttcaagctgctgttttttcacctcgtagacttccataaactgatggtagtcgccgacataacgtgtcagctcttgattttcaacgtgataaatcaggttgatgacactattcaagaacggaatatcgtgggaaatcaggatgaacgcgttctcgtattcctgcaggtagcgtttcagccattcaatatgctgttcatcaagatagttggtcggctcatcgagaagcagaatttccggcttttcaaggagaagcttagcgagaaggacctttgtgcgctgtccgccgctcaaatcggtgacatctcgctctaaaccgatatcgctcaaaccgagaccgcgggcgatttcttccaccttggaatcaatgacataaaaatcattgtttgtcagcgcgtcttgaatgacgccgacttcttcaagcagcttctcgagctcgtcgggatcagcctcgcccattttgttgtaaatctcgttcatttcctcttccatcgcaaataaataatggaatgcgtctttcaggacgtctcgaatggattttcctttttccagcacggtatgctgatcaaggtatccgacacggacgttttttgaccactcgacttttccctcatcaggttcaagctttccggtaataatattcatgaaggttgattttccttcaccgtttgcgccgatcaaaccgacgtgctcgccttttaacaggcggaaggaaacgttattaaaaatggcccggtccccgaaaccgtggcttaaatcctttacagataaaatactcatgtttacacctctatcgttatcaaacacgcacaatcggcgtgtaatattcactcttttgattataaaggaggattcggaatgttgaaaggtataggaaagaaaaagaaaaattgcgttccgggcgaggttttgagatactatggaatagatttcaggaattgaggagaacaaaatgacgcaaacttggccatttttacataatgcacaatcatttatacaagagaattggaatgcttccggctttcaaacgccaacccctgttcaagagcaggcagcccagctgatcatggacggaaaggacgtcattgcagaatcgccgacaggtacagggaagacgctggcgtatgcgctgccggtcttggagcggatcaaaccagagcaaaagcatccgcaggctgtgattttagcgccttcccgtgagctggtcatgcagatttttcaggtgattcaggattggaaagcgggctcagagctgcgcgcggcttccttaatcggcggggcgaatgtgaagaagcaggtcgaaaagctgaagaaacatccgcatatcatcgtcggcacgccaggcagggtatttgaactgattaaagcaaagaaactcaaaatgcatgaagtgaaaacgattgtacttgatgaagcggatcagcttatcctgccggagcatcgcgaaacgatcaaacaaattattaaaacgacattaagagaccgccagcttctatgtttttccgcgacactcaaaaaggaaacagaggatgtgctccgcgaattggcgcaagagcctgaggtgttgaaggtacagcgaagcaaggcggaggcagggaaagtgaaacatcaatacctgatttgcgaccagcgcgacaaagtgaagctgctgcaaaagctgtcaaggcttgaaggcatgcaggcactcgtatttgtgagagacattggcaacctgagtgtatatgcggaaaaactggcatatcaccacgttgaactcggcgttttgcacagtgaagcgaaaaaaatggagcgggcaaaaatcattgccgcattcgaagacggagagtttcctcttttattggcgactgacattgccgcacgcggtttagacattgaaaacctgccatacgtgattcatgctgatattccagatgaagatggctatgtccacagatcaggacgaacaggccgggccggaaaagaaggcaacgtgctgagccttgtgacaaaattggaggaatctaagctgaaaaaaatggcgaagaagcttggtgttgagctgagtgaagctgtgtatgcaggcggaaaactgaagacgaaataaaaagaagggcgaaaagccctttttttgttgtaaaataatagaaaaagtttcgcgcagggggtgggaaggtggtttcaatagacaggtttcaagcagtgaaggagtcagagctgaaaattcttgaaagctggtttgagaatgaggataccagacggagaatggatgggatgctgccattagatgaatggtatgcacgagtaaataaagataaacacgatactgtcatcatggcgtatgatggacagctgccggcagggatggtcgttattgagttcggggagaagcggacatatattggattgatcgtcaatcctttgtaccggcttcaagggtacggaaaacggatattgcaaaagctgatgaccgaacctgattttactagcgtgcgggaatgggtggcatgcattgaagaagacaatcgaatcagtttagcttgctttcaagcagcaggattcactttggaagatacagaacctgatgaagatggttttcttacgctgattcttcgcagctgatctcatcgaaacacaaaaggagggcaaaaagccctcccgttttcatcttcattcagctcggatcactgaccttgatcagctgtttccctttattttctcccttaaataaaccgagaaacgcgtcaggaatgttttcgaagccttctgtgatggtttcctcgtaatggagtttaccagccttcagccattcggccagctgttttgctccctcagaaaaacgatcggagtagtcgcttacgataaagccttgcatcagcgacttcgttttaatgagttttgattggacacgagggcccatgtcatctgcttcgctttctgcgttataggaagaaatggcgccgcacaccggaatgcgggcaaattcattgagcagattcatcaccgcgtctgaaatcggtccgccgacattgtcaaaatacacatcgacaccgtctggacaagcgttttgaagcgctttttggatatcatccgctgttttgtaattgatggcttcgtcaaactgaagctcctgttttaaatagtcgattttttcatcagaacccgcgataccgacaactcgcgcgcctttgattttggcaatttgcccgactgttgaaccgacggctccggcagctccggagacaaccacggtttcgccttccttcgggcgtccgatgtccagcaatccgaagtatgctgttaagccggtcattcccaaaatgccgagataggccgaagcgggagcaaggcttgtatcaatttttcgcaaggcagactcgctcacagcggaaaattcctgccagctgagatttccgatgacgatatcgccttttttcagatgattcccgtctgacacaacttcagcgataaccccgccagaaagcgcttcatccaaggcgaacggctcaacatatgacttcgtatcctgcatacggccgcgcatataagggtcaaccgaaacataaagcgttttgacaagcacttccccttgcttgggttcaggaaccggaatggtttcaaagcgaaagtcttcatgaacaggaataccttgtggacgtcttgctaattgaatttgctgctgagatgctgtcattttcatcctcctatcacttggttgacaccactgtaacatggacaggagaggaaatacaaaaggtaagctggcatacaaaaaaggagagggggctcctctccttttcatttcgcccgtaatttcgggcacagtcccgtcggcaggcacattggcttctggtcgatcgggcttctcatgatgcagcattccaagccgaagacttcacggaaaaatggctgggtgaacacatcttccggtgttccggcgttgtatatttttccgtccagcacactgattagatagtcagcgtattgagcggcttggtttaaatcatggagcaccatgacaacggtgcggccatggtcgcggttcagctttttcagcagttcaagcacttcaatctgatgtgagatgtctaaatacgtggtcggctcatcaagcaaaagcaaatcagtgccttgcgcaagtgccatggaaatccaggctctttgtctttggccgcctgagagggcatcaagtgtccgatccttcagttcaatcatgcccgttgcttccagcgcccactctaccatgtcatgatcctcttgggtatgcttggataacagctttttgtgaggatgtctgccaaaatagcataactcctctaccgtcaatccttcaggggcctgaggagattgtggaagaatggccagtttttttgcgacttcttttgatggctggcggtggatgtcttttccttctagtagcactgtaccgcttttcggggccatcagcctggcgagcgatttgaggattgttgatttaccgcagccattagcgccgatgagcgcagtgatttttccttcttctatctttaagtcgactccgtcaataatcactgtactgtcatatgaaagagtgagctggtctgcagccagttttcccatggtatcctctccctactgtttcctcgcttcgaatttcaataaatataagaaataaggcgcgccgatcacggctgtcagtattccggcaggtatttcaaccggaggcatgatgccgcgccctaacgtatctgcaattaataatataatagcaccaatcaatgccgatgcaggcagtaaatatttagctttttctccggtaagccgtctggcgatatgcggagcaagcaagccgataaaaccgattgagccgacgacggctacacagcttcccgccagcgccaccgcggtgaaaatcaggatgaatctcagccggtttgcgttttctccgagaccctgtgcaagctcatccccgagtgacataagatccagcttcggtatgagtatgcagacgatcggaaaaagaatcaaaagccatggcgcaagcaggttgacttcttcccagtttcttccccagaggcttcctgtcagccaaatgagtgcagcattcacgtcgcctggaaacttgaccatcatatattgcattccggcgtggcagaccgcgcctaaagcaatgcctgataaagccagtgaagagggctgaatgctcttttttcgggctatcattaataatagtacagcaataatggcggctccggcaaatgcggagaacggaagcacgtataccggcgactcaggaaagatgagaatcacagccatcgccgcaagtccggagccttttgaaatgccgacaacgtccggggaagcgagtggatttcggatcacaccctgtaaaatcgctccggcagcggcaagcccagcaccggccaaaatcgctaatataatgcggggaaggcgatattgctggatgataaattcaaaggaatgatccagtcccagcagattcgtcactaccgcatcaggtgaaatgtataatgcaccgattccaatgctgatgacggacagaacgattaaaatcacggccaatatgagtatcgccagtaaggggcgtttttgttttctggttgttttcttcatttcagatgtcgccctttccttgccaaatataagaaaaacggcgttccgataatcgcggtgacaatgccgaccggtgattcataaggaaatgcaatccatctggccagtacatctgcgtacaccagcaaaatggcaccgaacagtgccgaaaacggaagcacgtattgataatgttctccgatcagcttgcggacaatatgcgggacgagcagcccgacaaagccaatcggcccggcgacggctacggaagcgccggaaaggattaaaataatcaaactgatcagaatccggatgccgttcatattttgtccaagcccttttgctgtttcgtctccgagaccgagaacagaaacagaaccggaaaatacgagggcaagcccgatgccaatgacagaaaacggagcgatggttatgacgtcctgccagttgctgccgtcgattgcgcctgtcatccagtacagaacatcctcacctgactcatttaaaataatgatggcctgtgtcatagaggagaggaacaaatgcacggccattcctgacagcgccagcttaacaggtgtcattccgccggatgaggcaatcatatacacaatcgcgccgcctgctgccgcacccgcaaaagcgaatataacagatgaatagggcgatgccggcagaatgacgagagaagcaacgacaaaaagcgatgcacccgcattcacaccgaaaatttggggtgaagccagagggtttctggtcatagcctgcattagcgcccctgctacagctaggctggcgccgacaaaaacgccgattaatgtgcggggaaggcgaagagtagagatgatgagctgttcctttgaaccgtcccatacaaaaagatatttcaatgaatctatgatgccgatgtctgaggctcctactgaaagattcagcccaagcccaaatataaaaataatcagtgcaatgatgaacatcatcagtcttgatgatgagcgccgtttggctgattgatacaacagtctcacttccttactgcgtctggttgcaaaaacgaagaagcaaggattcccctcgcttctcatttgtcctatttattatacacttttttaagcacatctttggcgcttgtttcactagacttgatgcctctgaatcttgtccaagtgtcacggtccgcatcatagacttgtccatttttcaccgctttgagatttttccagagcgggttcgttttccactcatctacaatggttttgccttcgttggctgagatgaacaaaatatcaggatcgattttgctcaattgctcaaggctgacctcttgataggcgttatctgacttcacagcgtgtgtaaagcctagcattttaaagatttctccgtcataggatgatgatgtatgaagctggaaggaatccgctcttgcaacgccgagaacgatgttgcggttttcatctttcggaagttcggcttttagatcgttgatgacttttttgtgctcggcaagcttttcttttccttcatcttctttatttaatgctttagcaatggtcgtaaagctgtcgatcgtttcgtcatatgtcgcttcacggctttttaattcaatcgtcggagcgatttgtttcagctgtttataaatgtttttatggcgctcagcgtcagcgatgattaaatcaggcttcaaggaactgatgacctcaagattgggttcgctgcgtgtgcctacagatgtgtaatcaatggagctgccgacaagctttttaatcatatcttttttgttgtcatctgcgatgcccaccggcgtaatgccgagattgtgaacggcatccaagaatgaaagctcaagcacaaccacccgcttaggtgtgccgcttactgtcgtttttccttcttcgtcatggatcactctggaatccttagacttgcttccgccgcttccgttgttattctggcttgatgaacagccggatacaatgaggcaggcgagcaataaaacacttatgatggcaatcaacttgttagaataggtgcgcatgtcattcttccttttttcagatttagtaatgagaatcattatcacatgtaacactataatagcatggcttatcatgtcaatatttttttagtaaagaaagctgcgttttttactgctttctcatgaaagcatcatcagacacaaataagtggtatgaagcgttaccgtgtctttgagacaaaaacgcatgggcgttggctttagaggtttcgaacatatcagcagtgacataaggaaggagagtgctgagataaccggacaatttcttttctatttcatctgttagtgcaaattcaatgtcgccgatattcatgataatcgagaaaacaaagtcgatatcgatatgaaaatgttcctcggcaaaaaccgcaagctcgtgaattcctggtgaacatccggcacgcttatggaaaatctgtttgactaaatcactcacaatccaagcattgtattgctgttctggtgaaaagtattgcattagacatacctcctgctcgtacggataaaggcagcgtttcatggtcgtgtgctccgtgcagcggcttctctttaattttgatttttctgaaaataggtcccgttcctatcactttaccatggacggaaaacaaatagctactaccattcctcctgtttttctctttaatgttctggaatctgtttcaggtacagacgatcgggtatgaaagaaatatagaaaacatgaaggaggaatatcgacatgaaaccagttgtaaaagagtatacaaatgacgaacagctcatgaaggatgtagaggaattgcagaaaatgggtgttgcgaaagaggatgtatacgtcttagctcacgacgatgacagaacggaacgcctggcagacaacacgaacgccaatacgatcggagccaaagaaacaggtttcaagcacgcggtgggaaatatcttcaataaaaaaggagatgagctccgcaataaaattcacgaaatcggttttcctgaagatgaagccgctcaatttgaaaaacgcttagatgaaggaaaagtgcttctctttgtgacagataacgaaaaagtgaaagcttgggcataaagcaaggaaaaaaccaaaaggctatgacggccttttggtttttttgcggtctttgcggtggtattttgcagaatgccgcaataggatagcggaacattttcggttctgcatgtccctcaatttgctattatatttttgtgataaattggaataaaatctcacaaaatagaaaatgggggtacatagtggatgaaaaaagtgatgttagctacggctctgtttttaggattgactccagctggcgcgaacgcagctgatttaggccaccagacgttgggatccaatgatggctggggcgcgtactcgaccggcacgacaggcggatcaaaagcatcctcctcaaatgtgtataccgtcagcaacagaaaccagcttgtctcggcattagggaaggaaacgaacacaacgccaaaaatcatttatatcaagggaacgattgacatgaacgtggatgacaatctgaagccgcttggcctaaatgactataaagatccggagtatgatttggacaaatatttgaaagcctatgatcctagcacatggggcaaaaaagagccgtcgggcacacaagaagaagcgagagcacgctcgcagaaaaaccaaaaagcacgggtcatggtcgatattcctgcaaacacgacgatcgtcggttcagggactaacgctaaagtcgtgggaggaaacttccaaatcaagagtgataacgtcattattcgcaacattgaattccaggatgcctatgactattttccgcaatgggatccgactgacggaagctcagggaactggaactcacaatacgacaacatcacgataaacggcggcacacacatctggattgatcactgtacatttaatgacggttcgcgtccggacagcacatcaccgaaatattatggaagaaaatatcagcaccatgacggccaaacggatgcttccaacggtgctaactatatcacgatgtcctataactattatcacgatcatgataaaagctccattttcggatcaagtgacagcaaaacctccgatgacggcaaattaaaaattacgctgcatcataaccgctatcaaaatattgtccagcgcgcgccgagagtccgcttcgggcaagtgcacgtatacaacaactattatgaaggaagcacaagctcttcaagttatccttttagctatgcatggggaatcggaaagtcatctaaaatctatgcccaaaacaatgtcattgacgtaccgggactgtcagctgctaaaacgatcagcgtattcagcgggggaacggctttatatgactccggcacgttgctgaacggcacacagatcaacgcatcggctgcaaacggactgagctcttctgtcggctggacgccgtctctgcatggatcgattgatgcttctgctaatgtgaaatcaaatgttataaatcaagcgggtgcgggtaaattaaattaagaaagtgaaaaacacaaagggtgctaacctttgtgttttttaattaattaaaatgtttattaacttagttaaggagtagaatggaaaaggggatcggaaaacaagtatataggaggagacctatttatggcttcagaaaaagacgcaggaaaacagtcagcagtaaagcttgttccattgcttattactgtcgctgtgggactaatcatctggtttattcccgctccgtccggacttgaacctaaagcttggcatttgtttgcgatttttgtcgcgacaattatcggctttatctccaagcccttgccaatgggtgcaattgcaatttttgcattggcggttactgcactaactggaacactatcaattgaggatacattaagcggatttgggaataagaccatttggcttatcgttatcgcattctttatttcccggggatttatcaaaaccgggctcggtgcgagaatttcgtatgtattcgttcagaaattcgggaaaaaaacccttggactttcttattcactgttattcagtgatttaatactttcacctgctattccaagtaatacggcgcgtgcaggaggcattatatttcctattatcagatcattatccgaaacattcggatcaagcccggcaaatggaacagagagaaaaatcggtgcattcttattaaaaaccggttttcaggggaatctgatcacatctgctatgttcctgacagcgatggcggcgaacccgctgattgccaagctggcccatgatgtcgcaggggtggacttaacatggacaagctgggcaattgccgcgattgtgccgggacttgtaagcttaatcatcacgccgcttgtgatttacaagctgtatccgccggaaatcaaagaaacaccggatgcggcgaaaatcgcaacagaaaaactgaaagaaatgggaccgttcaaaaaatcggagctttccatggttatcgtgtttcttttggtgcttgtgctgtggatttttggcggcagcttcaacatcgacgcaaccacaaccgcattgatcggtttggccgttctcttattatcacaagttctgacttgggatgatatcaagaaagaacagggcgcttgggatacgctcacttggtttgcggcgcttgtcatgctcgccaacttcttgaatgaattaggcatggtgtcttggttcagtaatgccatgaaatcatccgtatcagggttctcttggattgtggcattcatcattttaattgttgtgtattattactctcactatttctttgcaagtgcgacagcccacatcagtgcgatgtattcagcatttttggctgtcgtcgtggcagcgggcgcaccgccgcttttagcagcgctgagcctcgcgttcatcagtaacctgttcgggtcaacgactcactacggttctggagcggctccggtcttcttcggagcaggctacatcccgcaaggcaaatggtggtccatcggatttatcctgtcgattgttcatatcatcgtatggcttgtgatcggcggattatggtggaaagtactaggaatatggtagaaagaaaaaggcagacgcggtctgccttttttttattttcactccttcgcaagaaaacggattttgaaaaatgagaaaatttcctgtgaaaaatggtatgatctaggtagaaaggacggctggtgctgtggtgaaaaagcggttccatttttccctgcaaacaaaaataatggggctgattgcggctctgctggtctttgtcattggtgtgctgaccattacgttagccgttcagcatacacagggagaacggagacaggcagagcagctggcggttcaaacggcgagaaccatttcctatatgccgccggttaaagagctcattgagagaaaagacggacatgcggctcagacgcaagaggtcattgaacaaatgaaagaacagactggcgcgtttgccatttatgttttggacgaaaaaggagacattcgcagcgcctctggaaaaagcggattaaagaaactggagcgcagcagagaaattttgtttggcggttcgtatgtttctgaaacaaaagcggatggacgaagagtgatcagagggagcgcgccgattataaaagaacagaagggatacagccaagtgatcggcagcgtatctgttgattttctgcaaacggagacagagcaaagcatcaaaaagcatttgagaaatttgagtgtgattgctgtgcttgtactgctgctcggatttattggcgccgccgtgctggcgaaaagcatcagaaaggatacgcttgggcttgaaccgcatgagatcgcggctctatatcgtgagaggaacgcaatgcttttcgcgattcgagaagggattattgccaccaatcgtgaaggcgtcgtcaccatgatgaacgtatcggcggccgagatgctgaagctgcccgagcctgtgacccatcttcctatagatgacgtcatgccgggagcagggctgatgtctgtgcttgaaaaaggagaaatgctgccgaaccaggaagtaagcgtcaacgatcaagtgtttattatcaatacgaaagtgatgaatcaaggcgggcaggcatatgggattgtcgtcagcttcagggagaaaacagagctgaagaagctgatcgacacattgacagaggttcgcaaatattctgaggatctcagggcgcagactcatgaattttcaaataagctttatgcgattttagggctgcttgaacttggggagtatgatgaagccattgatctgataaaagaggaatatgcgatacaaaatgaacagcatgatcttttattccataacatccattcgcagcaggtgcaggccattttgttagggaaaataagcaaggcatcggaaaagaaggtcaagctggtgattgatgagaacagctcactcgcgcctcttcctgcgcatatcggcttgtcccatcttattacgattattggcaatttaattgataacgctttcgaagctgtagcggagcaaagcgtgaaggaagttttgttttttatcacggatatgggccatgacattgtcattgaagtatcagacacagggcccggtgtgccgccagagaaaatagaagctgtgtttgagagaggctattcttcaaaggggatgaggagaggctacggtctggccaatgtgaaagactcagtgcgtgaactgggcggctggatcgaactggcgaatcaaaaaactggcggggcggtattcactgtgtttataccgaaggagaaacaaagggggaatccatttgattcacatcgcgattgcggaggatgattttcgagttgcgcaaatccatgagagattgattaaacagcttgatggattcaagattatcggcaaggcggctaacgcaaaagagacattggcgcttttgaaggaacacaaggctgatttgcttctgctggatatttatatgccggacgagcttgggaccgcgttgattcctgatatacgaagccgatttcctgaagtggacattatgattatcacagcggcaacagaaacccgtcatttgcaggaagcgctaagggcgggaattgcccactatttgatcaaacccgtaacagctgacaagttcaggcaggtgctgcttcagtataaagaaaaaaggaagctgctcatgtctcagccggaggtcagccaatccatgatcgaccatatttttgggaacagtgtgaagacagctttgccggcagagaatttgccgactggcattaattcgattacactgcgaaaaattaaggaagcgcttcagactgcgtcagaaggattgacagcggaggaacttggggaaaaaatgggggcgtcacgaacaactgcccgccgttatgccgagtaccttgtgtcaaaggaagaagcaagagccgagcttgaatacgggattatcggcaggccggagagaaaatattatttggcggcggattagatatgaaaaaatctataatcctattgattattctattgatctttactcagggtgatatcaggcaggcggctgcgccgcgcctgccggacgggccgatagaaattgtcgtccctgccgaaccttctggcggctgggatgtcacagcgcaggcgatccaatcagttttgaggcagaagcagatcgtgaaggatgatgttcatatcgtctataaatccggcggcgggggagagaaaggctggaaatatgtcaacaaaagcagcaaacaaaccatcagcatgacgtccagcttaatattgagcaatgatcttctcgggcaaagcaaattaaaaatggccgattttacgccgctcgccattctctccaaggaatggcagacggttgcattgccaaaaggatcagcgttaacaaatggcaaggatgtgctgaatgagatcaacatgcatcccggcaaggtgagaatcggctttgccccggggtttggcaatgatgatcagctctcgttcgtcagagcggcagatatgtacggcattgacccgtttgacattcaattctcacagtatgacagcagcgaacagctcattcaggcgctgatcagacatgagatagaagcggcttccatgaccctttctgaagcgaaaccatatgaacgaaacggcgatatcacgttagccgctgtaacatctgataaaagacttcccggttttccaaatgtaccgacgtggaaggagcagggaatcccgtttgttttttctcattggagaggaattttgggtccgaaaaatatgtctgaggaagagatttcttactgggatcaagcgctaaagaaggtcacctcttcacctgaatggaggcggaaaataaacgaacaggactgggaaagcttttatttaaacagcagggaaacgaaacggtttttagaagagcaatctgctttttatcaaagcatcatgacaggaaattaagatcccggcatccccgggatttttttcatgccgaaaattgatcaaaaagaacaaaacggttttaaaaaattaaaaatacaaaaaaaacaaattatttacttgcggttggttttcccatacgatggcaaaaaggcaagacaaaaaggggagtaagggagaaaaaaatgtaagcggattcatttaagggggaatggatgtgttagcaatcttaggctttctcatgatgcttgtgtttatggcattgatcatgacaaaacggctttctgttttaacagcattagttttgacgccgattgtgtttgcgcttatcgccggatttggatttactgaagttggggacatgatgatttcggggattcagcaagtcgcgccgactgcggtcatgattatgtttgcgatcttatattttggaattatgattgatacaggcctgtttgatccaatggttggcaaaattttaagcatggtcaaaggagaccctttaaaaattgttgtcgggacagcggtccttacaatgctcgtcgccttggacggagatggctcgacaacgtacatgattacgacaagcgccatgcttccgctctatttgctgctaggcatccggccaattatcttggcaggaatcgcgggagtcggcatgggaatcatgaacacaattccatggggaggtgcgacgccgagggcggcgagtgcgctgggtgttgatccagctgagcttacagggccgatgattcctgtcattgcaagcgggatgctttgtatggtggcggttgcgtatgtgcttggaaaagcggaacgaaagcgccttggtgtgattgaactgaaacagccagccaatgccaatgaaccggcggctgcggttgaagatgagtggaagcggccgaagctttggtggttcaatttattgttaacgctttctttaataggatgtttagtatcgggtaaagtcagtttaaccgtactgtttgtcattgcgttttgtattgcgctgattgtgaattatcccaatctcgagcatcagagacagcgcatcgcggcgcattccagcaacgtgctggctatcggttcaatgatttttgccgcgggggtgttcacggggattttgacaggcacgaaaatggttgatgaaatggcgatctcgctcgtgtccatgataccggaacaaatgggcggattgatcccggcgattgttgccttaacaagcggcattttcacattcttgatgccgaatgacgcgtatttctacggggtgctgccgattttatcagaaacagctgtcgcatacggtgtggataaagtggaaattgccagagcctctattatcggccagccgattcatatgctgagtccgcttgtgccatccactcatttgcttgtcggactcgtcggagtttctattgatgaccatcaaaaattcgcattgaaatgggcggttctcgcagtgatcgtcatgacggctatcgctctattgatcggtgcgatctctatttccgtatgataattcaggcgtaatgacacacactaacggcatacaacattccggaggtgtcattatgagtgatccttatatgccgctgacttcagtcagaagcggaacggggttcgaagcggcaaaaggggtgcacggcctgactgtgcaaattgcgaatgtctattttattcagctgccttctgaacctcactcatttgttttaattgatgccggcatgcctcaatcagccggcatgattgtcaatgaagccaaacaaagattcggtgaagggtttcagctgaaggcgattatcctcacacacgggcactttgaccatattggggcaatcgaagagatccttgagcattgggatgtgcctgtttatgtccattctcgggaaatgccttatgtaacaggtaaaaaggattatcctccggctcgtcctgacagcaagagcgggctggtcgctaagctgtcgccgctgtttccgcggcactccatcgatatttcctcacatgtccaggcactgccggaagacggttcagtcccttttcttgacgagtggatgtggatcgcgacaccaggacacacgccgggccatatttcgttattccgcgatgacggccgcgtgcttgtagcaggtgatgctgttattacagtggaacaggagaaaatggctgacgtcttgatacaaaaacaggagcttcacgggccgccggcttatttcacgcctgacacagagacggccgcggagtccattctaaagctggccggtcttgaaccggaagcgttattgacagggcacggcataccgatgaccggcaaaaactttcgaagtgacttaactgaattggcaaatcggttatcgtctatttgacacccgcaccacgcgggtgttttttattgttttccaggaagttgcagaaaaatcatttgtcttgccgcttaaaaacgatacaatgaaaagcatgaagtgatgtgaaggggagagtttgttggaagaaaaagaaatactctggaacgaagcgaaagcgtttattgccgcatgctatcaggaattgggaaaggaggaggaagtgaaagaccgtctcgaggacattaaaagtgaaattgacctgaccggaagctatgtacatacgaaggaagagctggagcacggagcgaaaatggcttggagaaacagcaaccgctgcatcggcagattgttctggaattcgctgaatgttattgacagacgagacgtccggacgaaggaggaagtgcgtgacgccctcttttaccatattgaaaccgccaccaataacgggaaaatcagaccgaccattacgattttccctccggaagagaagggtgaaaagcaagtcgagatctggaatcatcagctgatccggtacgctggatatgagtcagacggagaaagaatcggcgacccggcttcctgttccctgacagcagcctgcgaagagctcggctggcgcggagaacgaacggattttgacctgctgccgctcatttttcgcatgaaaggcgacgaacagcctgtctggtatgagctgccgcgttcacttgtgatcgaggttccaatcacacatccggacatcgagacgttttctgatttggagctgaagtggtacggcgtgcctatcatctctgatatgaagcttgaggtcgggggcattcattataatgccgcgccatttaacggctggtatatgggcacggagatcggagcgagaaacctcgcagatgaaaagcggtacgacaagctgaaaaaagtagcgtccgtgatcggcatcgccgctgattacaatacggatttatggaaggatcaagcgctagttgaattgaataaagctgtgctgcactcgtataaaaagcagggtgtcagcatcgttgaccatcatacagcggcaagccagtttaaacggtttgaagaacaggaggaagaagcgggcagaaagctgacgggggactggacgtggctgattccgccaatttcacccgctgccactcatatcttccaccgatcctatgataactcaatcgttaagccgaactatttttatcaagataagccttatgagtaaacaatagaaaatcgatgatggccttcaaggctgcgggattcagtcacagagatgtcggtaacctttgagaaagggcttccgttctttacagcctcaacaaacgattgcagggcgttttccggaccctctgccaaaatctcgacacgcccgtcatcacggtttttgacccagccggccagttttcgcttatcagcttccatttgaacaaaatagcgaaagcccacaccttgaacccggccgtctacaatgattcggtattgaagcatgtaaaaaccaccttttctttttatgataatcaatcattttacaacctgtaaaggggatgtgtttgtatgaaaccagagcgctattcagttctttctcttaatctgggaaaaccgcagacgcttgaatatgacggaaagaaaatcgataccggcatcatgaagcgtccggctgaatcagccgtcatgctgtatcgggagaattttgaaggagacggacaggcggacctcgtcaaccacggcggacctgataaggctgtctgtgtctacccggcggagcattatccgttttgggaagagttcctctcaagaccgctgtcaaatgccgcatttggagaaaatctgacggtcgcgggcctgactgaggagaatgtttgcatcggggatgtgttcaggcttgatgaagctgttgttcaggtcagccagccgcgccagccgtgtgtaaagctggcgaaaaagtttggtgtaaaagaaatggtgctgaaggtccagcaaaccggctatacagggttttattttcgcgtgctggaggagggcagggtgtctcccggcgcgaaccttgaattgctgtccagaggagagaagggcatatccgtccagttcgccaaccgcatcaactaccatgatgcaaaaaatctcaccgccattgaacggattttaagtgaggctgcactatcggaaagctggagagcgtcctttatgaaaaaaaaggacaggctgctgccggttgaatagaaaaaagccgcgcatatcaacgtgcgcggctttgccatatttaagattgttttttctttgtttcaagcaggttggcaagaaaataggttttatagctttgaagctttcttccctcatggtgcgtgatcccctgcttttttagttctgccacataccagcctttactgccgtaatgcatgtcagaaaactcctttccctatctgatttcgaaacgattggcattgtaacatctataaaaagatgctgaaaagagatgcggggaaaactgagcctttcgaactagatgtgcgaatgttcttctgtatgtatatgcggagcaaaagccgaatatgatttaatggccggttagtttgatcatgacaacgccaaatgtcataatggcgaaaacaatgccgatatatgtgagcatcccgttttttttcttaacgccgtaaacggttataatgatgccttcaatgaaaaaaatgatgccgaaaataataaaccacatgcagataaaggctcctttcacagacataatagtagtgtagcatatctgaaagagccgggctgtgataatatcaagaaagccgggcgcatatcgcccggctcatgttttattgtttatcaaccaatttgaccagaagctgtgccaaatgttctttctcatcttcgtccgcaacgctccaaagctcttgcagcagcatttcttcaccgttttgcggctcttcatgctttgcgaggtagtctcccaggatcgcagcgctttttacaagcttgccgtcatccaatcccagctttttgcctcggttgacttgttttttcaggtagcctttaaattcatcaaagtcttttaaaatgtcttcttttattgtgccatgcatcgcgttcatttcgttttcaatttggattttttcttgatctctgttcattgcaagacctcctcgtgcagaataatgatgttttacctgctattggaggaggttaaacctgccggaagcccggaatgtgttttacagtttcgtcaggataatcggttcatcttttgtgatgacgatcgtgtgttcaacttgggcaaccatgcttttatccggcgtcttgaacgtccagccgtctccagcttcaacaatcgtttctgctttcgttgaaataaacggttcaagcgcgatgactgtgccatttttgaacagtgcgttatcaaacggatcataatagttcatgatgtggttcggcgcttcatgcaggcttcggccgattccgtggccggtcagggttttgatgacggtaaagccttgagagcgtgcttcatgataaacggctcttccgatctggttttggcgcttgcccgcttttgcctgctgaagccccttttgaaaagcgttttccgcgcattggcaaagcttatgaaggcgttcttctccttcaccgagcacaaatgagatgcctgtgtcggaatagaagccgccaaattcagcggagatgtcgatgttgacaaggtcccctgcttttaaaattttggatgtgcttggtatgccgtgagccacttcatcatttacgctgatacatgtcacacctggaaaatcgtattccttctcaggagctgaaacggcgccgtgctcatcaagcacagcttttccgataaggtcaaggtcttttgtgctcatgccgggctctgccttccgcttcatttcttcacgcgcaagcgcgacgattcttccgatttttttcaggccttctaattcttgatcgtttgttacaatcatctgtcattcccgctttctttttaaataatctagattaagcttaccacaactgtcttaaaaataggaaacacacggacctgggaaaaaagaaatacccccgggaaaattggtatagatcactagatatcttatatggtatatttgaaaaaaaagggtatgaggggatgggtatgctttcatttttacaaaaactcgggaagtcatttatgctcccgattgcggttctgcctgcggttggaattatccttgcgcttggcagagaggatgtatttaatatcccgtttgtctatcaggcggggacggcggtttttgatcatctgccgcttatttttgcgatcggtattgccatcggcatttcaaaagacagcaatggggccgcgggtttatcaggggcgatatcgtatctgatgcttgacgcggcaacaaagacaattgataaaacaaataacatggcggtgtttgggggaattattgccggtttaattgccggttacacctataaccgcttcaaggataccaagctgcctgaatatctcgggttcttcagcggcagacggcttgtgccgattttaacagccattattacgatcattttagcgggcatattcggagtcgtctggccgccgattcaatcgtgtatcaactcgtttggagagtggatgctcgggctcggcggcatcggggcaggcatattcggccttttcaacaggctgttaattccgcttggccttcaccatgtgctgaacaatattttctggttccaattcggagaatataacggagtgacaggggatctggcgcgctttttcgcgaaagatccgacagcgggcacatatatgaccggattcttcccaatcatgatgttcggtcttccggcggcgtgtctggctatgattgtgactgcgaagccgtctaaacggaaagcgacggctggaatgatgattggatttgctttaacagcgtttatcacagggattacggagccgattgagtttgcatttatgtttttatctccgcttttatacgctgttcacgcggtcttaaccgggttatctttatttatcgtcaactggctcggcatccgttcaggcttctctttttcagccggagctatcgattatgtgctcagctatggaatcgcagaaaaaccgctgcttctgcttttggtaggtatatgctatgcggcagtatactttatcgtgttttatgtactgattaaggctttgaatttaaaaacgcctggacgggaagacgatgatgtggatgaagtgctggatgaaaatactgttcaggatgtaaatgaaaacatcatgctgaaagggctcggcggaaaagaaaaccttcaaaccattgatcattgcgccacaaggctgcgactgactgtgaaggataccgctttggtggatgaagcgctgctaaagaaagcaggcgcaaaaggggttgtcaaatcaggggggcaatcggttcaagtcattattggcccgaatgtggaatttgcggcggaagaattgagggctgctgtcaaataaaaaaagcggagagggcaacctctccgctttttcttatttatcttcgttatcctttgacgtttcggaagaatcttcgtcatgttttgtgtaatcataatcagaaggattcaccttcttaaaacctttcggctcgtagaaccgcagcaggtctccgtttatgattttatcggacatttcaagttccttcttgacgagcgagtcttctgacttgtcgacttcggattcatcgagttcttttccggttttcgtgtcgtaatacttaccggatattttcgtgtacttcggtgaaataaagtctccgtttcggaacggaatcacttcacggtgttctttcgataaaatatcagaaccggacatcagatagtccttcgtatccactccgagcagatgcagaatggtaggagccacatcaacgtctccggcatatttatgaactttctcgcccttcacgccggcagcgtggataaagagcggcacccgttgaagctgggcgttgtcgtaatcagtgatttcatccttgccaagcactttcgccatcgctttattgtggttttcagagatgccgtagtggtctccgtacatcacaataatcgatttatcatataacccgtcttttttcagatcattgaagaattgttcaatggactgatcaaggtaatgggctgactggaagtagttatcgacgacagagtcaccaaagtctccagccgggaagtctgtatccccctcatccattccgaatgggaagtggttagacagggtaatgaacttcgtatagaacggctgcggcaggctttccagcagcggcattgattctttgaagaacggtttgtctttcatgccgtagtttttcgtgttttcttcgttcatgtcatagtaagcagaatcaaagaatttatcaatgccttccgccttgtacatttcgttacggttccagaacgtctgcgtgttcccgtggaaagtagcagatgtgtaattcttagacttcagaatcgccggaacggattgcagcgtgttttgcgctttgtttacgaaaactgaaccttgagccagcgggtacagagagttttccatcataaattcagcatcagatgttttaccttgtcccgtttggtggaaaaagttatcaaagtagaacgtttcgttatcatgtgccagtttatttaagaacggtgtcacttctttgccgtcaattttatagtcgatgataaatgactgcaaagattcaagtgaaacgtaaatgacgttttttccttccgctttgccgaaatacacgttattcggcacatcgtaattggctttcatgtagttttccacttccgtcacgtcgctggaatcggcaagcgcgcgctggctgttggacttgatattctgtacagcgtcataaatcgtgaaattgtatgttcccaagtatttcacaagatagttccggtcgaatgatcttgtcagcaattcaggacggtctgattccgcaactgccagattgatcaagaacacaagaattgaagacgcaaaaataattcggaacgattttttgcttgacgtttcggcaggcttgtttactttgatcgccaagatgatcaggatgatcgtatcgataaagtaaaaggcgtcagtcggtctcatcagcgaaaatgcgctgtcaccgagttggccgccgtttgttttagcctgcataatgaccggaattgtaataaaatcattgaaaaatctgtagtacacaatgttggcgtacagtaaaaaagacattaaaaaatgaatcactataatggctgtctgctgtaattttttcttgaacaagagtccaaagccaagaaagaacaagcttgagctaagaggattcacaaaaagcaatattttttgtatcgtgttgtctattcctaagttgaagttcaggacataaccgacatacgttttgatccataacaggacgaccgcgattaagaagaaggccagtcctctttcttttataaatgttttcattgttacactccttttttccgatccagttcgagcgaaacgatagaaaaaacgaacgtatccaatataacacgaatcagcagattagaaaagtgaaaatcgtatgatggagaaagtggcgaaaaacgccgtcgaatcaacgtttcgctttgatattaccaaatgtaaaacaaggtatctttctagaaatagaggaataaaatggtacattgggaattgtatgataaaatataaggtatagataaaaagaggtgaaatgatggatttttcccatattgtgtctgaagataaaattaagcgcgccatcaaagacggggactttcaaaacctcccgggaatggggaagccgctgccgaaggatgacgcggcacacttgccggaatcgctgcgcatgggctatcgtattttgaaaaacgcgggaatggcagaggacgagggcgcgctcaaaaaagagcttatgaccatcgaccatttaatcgaaaagtgctatgacgaaaaagaacgcgagcaattaatcagaaaaaaatctgaaaagcaattgctgcttgataagcttgtcgacaaaaaaggcatgttttcaaagccagcatccgctttttataagaataaagtatatgatcggcttggacgaaacagaccttcttccagctgatttgtcttgtctgcaggatggcgattgataatagccatcctttttatgttccaagttctatgtcaaaaggtttatgtttttccatctatgggaaatgattcataaacgaaaaaagggtgatgggatggaacgactattagtatggatagagcatatatctgattggctgtggggtccgccgctaatcatcctgctgacggggacgggcttgtatttcactattttgctgaaaggttttcaatttcgctatcctttatacattttcaaacagacaatcggcagcgtaggaaaaaagccgaagggagagggcacagtcacaccgcttcaggcattgacctcagccctcagttcaacgatcggtgcagcgaacattgtcggtgtgcccgccgctattatgtttggaggaccaggagcggttttttggatgtggcttattgccttatttgccatggcgattaagttttctgaaagtgttcttgctgttcattacagagaaaaaaatgagcagggtgaatacgtcgggggaccgatgtattacataacaaaagggctgcgcatgaaatggctcggcgtattcttctctgttgcgctgattgtggagctgatcccaagcattatggttcagggaaattcggtttcagtctcgcttgccgagacgttttctttcaataaaatatacgcaggaatcggaattgcatttttgattgggttagtggtgataggaggggtaaagcggatcggaaaagtaacagagtttgtcgtgcctcttatggcaggggcatacgcaggtgccggtctcctgattgttctcatgaatctatcatcagtgccggcgtttttctctctcatcttttcaaatgcgtttacctcttcttcagcagttggagggttcgcaggtgctgcgttggcggaaaccgttcgctggggatttgcccgcgggctgtattctaatgaagccgggatgggaacagccccgattgcacatgcggcagcaatgactgatcatcctgtgcggcaagggttttggtctgtgatcggcattgtcattgacaccttgatcatctgcacgaccaccgcttttgtcgttcttgcatctggtgtctggacagggaagaacgcctcaattgacccggcagcactgacgacggctgcatttcagcattatttcggttctggcggagggtacttcgtttcggtttccctagtcttctttgtcgtatcaaccattatggttgtcattttttacggcgtaaagcaagctgaatttctgttcgggcggctggcaggacacgtgattaaattcgtttatttagcggctattatcattggtgccgcaggcggagcaaaagccatttggggctttttggacttagcattggcttttattctcgttccaaatgtgattgcgctgttgttattgagcagaaaggtaaaagcgctgtacaccgaattctttacatctgaacagtactacctgaaagatataagaaaaacaaaacagaatcctgtttatcaaacaaaagaaactaaaaattcctagtgctttgctttggcgctgaacaacgctttgctttttatgatcaaataaatgagtaaaggcagcaaaagagaaatcactacattaatgattggtttgattctgttaaagtcgattagctgatttgtatttaaaaagaaccaaaagccgcatacgactgagaacatgccggttggtgtatacatggctttcgggtcgatttttgagtgtaaaaacgaaaggccgtataccacgatatatagggaacctgctatcttcaccataatgactggaatccaaaaagccgcgatgatcaggtctgagcgatccagaaaatccgtaatgcggatctgcctgatgaccatataagcaggatcaaagaaagtagatgtcaggttgggaccaaagacagaaattgaagaaaataacatcacggccagcaataaagcgcccagcagtatcgcgaaaatggtgtattttagcgggacgctccggtttgagaagagaagcggaaggataatcaattcccccattgtcccaaacgcgtaatagcctgattgaaggtatgggattagaccttcaaaaacaggtgtcaagttttgaagctcaatttgtgtggccagcgtaaatggaaggcacaagaccaggatgccgaatggaaataggaatatctgcgccattctggtcaatgtttcttttccctctctggcaatacagatcgccacaaagataataacaccgccaagaacagccattggtgttcttgggagaaataaaatgttaatcaaattgatgaaaaaacgtatatcatgagcattgattaacaggaaatacaaagaaaacagtaaaatgataatccggcctgcgattggtgaggaatcgctcagcagctcatagatatttttatcctgatgctttttcatcagcctatgcatgagccagagtgccggaatcacgaggacaacgccgaggatgtagctgtgccaggcattttgtttagctgattcgatcatgagaatcggagcatgctttaatccgactgctaacgtatacagagctccgaaaaataatccttggtatgcagaggtcttgtccataaagcacatcctttctgtcatgttcaaaacggaatatatttaaacaggtgccccagccgcggaagcaggggattcactctcatataaatccatagaaaagcacttcctgcaatcagcaggctgaaggcccattttgttagattgttagcggaacgaaaattcttccattcatatgcgtatatggcaatgcacacaatcaatgtctgtacgatatagctgatcatgctgacgcacctccattaatggctgatcgttttgtataggacaccgccctgctcaatcgtcacaattgggacgacgtgaacctccatatccttatatacctcttcccattcctttttcagcagattcttcgtggttgccgtgcttctgatggtcctgtcttgaaagccggccgggtccgcctttagcttttgcaaacgatgaacggtgctgatcacgtccttctttatggttctgtttagtgctttttgaatgatgtaatactggtcattttctctcgtctcataggttgattggttttccataataattcctttggctctgatctcgattgtcattgacagctttccgtttttttcagcggcatgaaaggatacattggacttttgaagctgaatggatgcttgtcccatttgattcggcaggtctactatgaattctggctggcgggcttgattcagcaacatcagggctgctgtcatgtgtacatctttgaaaatatccatcaatctgtcctttttaaagatcgcaagcccgtcaattttcaaattagatttgcctttccctccaggttttgttttagatgcagagatgaccggtgcatacggatcactgcctatttctactagatcagacatgaatctgcttaagaaaacgggccggctcgttgcgataatggccagctcccgaatcatttccgccggaaactgttcaagctgaacatcggtgtttaaaatgtcccgcgcttctccccggctgactaaaatgagcgccgttaatctgttctgcggatttcgcgttaaaatatcaaagactggggcaacgccgtctctcgccatatcctctccaataatgactgtacgtctgtgggacgtattgattgtccgtgacaaggaggtttgcagcttgttgttcgcttctctgatcgtagtgccggaagctgaatcaacataccatgtttttgaaccggcagttccgccgccgccccctgtttgtccgcctaattgaccgaccaagggaatctgcatggccactcgatactgatcttttttcttatcaatggctgagctgacaacaaatgcaatgtcattgatttctgtccggtcccagcaccccgttagaaggatacaaatgagaagcggcaaaacacacttatatattgttttcttcatcttttgggtcctctcttttcgctcccttctgtccgttgccgcgcgaatacgtgcccggccttctggtcatcgtccaccaaggcgccctgacaaaaatatcttttacttcatctcgtttaaacggagaaatcccggataaataaggaataccgaaagattgcagcttgcataaatggagcactaagataatcgtgccaagcataatgccgaaaatcccgaaaatactcgccaaaaacataagcgggaaacgaagcatcctgatggagatagctaagttaaaccgcggaattgtaaatgacgcgatccctgttaacgatacgatgatcaccatgggggcagacacaattcccgcttcaacagcggctgtcccaatgactagggccccgagaatactgacggtctggccgatggttttcggcaggcgcactcccgcctcacggagagcctcaaaagaaatttccataatcaatgcttctatgatggcggggaaaggaatcggttcacgagcggaggccacactgaacattaagtttgtcggcattaagtcctgatggtatgtaataacggcaacataaatagccggcaaatataaagcaacgaataaaaacatatagcgaagccagcggattaagttagacatcaaataacgctcatagtaatcttcactggcctgcataagctgccaaaacgtaatcgggcctgttaagacaaagggcgtattatctgtgaaaatggcaaatcggccttcgagaagctgggcggcgacagtgtccggcctttctgtgtattgcagctgggggaatggcgagtacgtgtcgtcttcgataaactcttcaatatatccgctttctaagacagcatcaatctttatctttttgattcttttttttactttgtcaatgacctttggatcggcaagcccgtcaatataggccaagacaacatcggttttggttttcgtgccgattttaaacgagatcattttaagctgaaacgttttgacgcgaaagcgcacaagagcggtattgaccctgaggctttcagtgaagccctctcttgaccctctgatggtcgattctgttatcggctcttcaatgcttcttctttgtccgccttttatatttaagatcaggccttttgagtgcccgtcggcaaataaaaccgcgttcccctcaatgatagatgcagccactttactcatactcgtttctgttgcaacacttgaaattgatagagtattttgcagcgcctcttcatgttcatctatttgatccgtcaaatgcgttaagaaagggcggagggcgtgatcctgaatatgttcagattttacaattccttcgatataaacaataaatccgcacagcccgtttccaaagtcaaattgtctaaatacgatgtctgagcagccttctgttaataaggtcagattatcgaggttttccttcaaattgggagagatcggtctgtcctgattgtcttcaagctctttgatgagctgaagcgctttgtcgcgtttattcatagaggctcaccctgctttttaatgtcatattcaataagtgcttgtgacttttagggtaaccttgtctgtttcatatattccagactaggatgaaagcgctataaaaaagtgttgactacctgtatatacaggaatacaatatgattataagttgtatatacaagttataaaaacggatacggaggggttggcatgggggaactgaacaaatcggcacgtcagattgtcgaagcagtcggcggtgctgaaaatattgcagcggcaactcattgtgttacacgtttgcgttttgctttaatagatgaaagcaaggttgaccaagagatgcttgatcaaattgatgcggtaaagggatcattctcgacaaacggacagtttcaggtcgtaatcggccagggaactgtcaataaagtatatgctgaactggttaaggaaacggggattggcgagtcaacaaaggatgaagtgaagaaggcctcagaaaaaaatatgaatcctttgcagcgtgctgtgaaaacgcttgcagacatttttattccaatattgcctgcgattgtcacggcgggtcttttaatggggatcaataacattttaacggcggaaggcattttcttcagcacaaaatcgattgtgcaggtttatccgcagtgggcggatcttgctaatatgattaacctgattgcaggcacggcctttacgtttttgcctgcgttaatcggatggtctgcagtcaagcggttcggcggcaatccgcttctcggcattgtgctcggggttatgctcgtgcatcctgatttgctgaatgcgtggggatatggcgcggcagaacaaagcggagagatcccggtatggaatctattcggcctagaggtgcagaaagtcggctatcagggccaggtgctcccaattttgcttgcttcttatatgctggcgaagattgaggtatttttaacaaaacgcacacctgagggcatacagctgctcgttgtcgcaccaattacgcttctcttaacgggatttgcctcttttatcattatcggcccgattacatttgcgatcggtaatgtactgacttcagggcttatctcggtgtttggttcttttgccgcactgggcggtctgttatatggcggtttctactcagcactcgtgattaccggtatgcatcacacgtttcttgcagtcgacctgcagctcatcggttcaaagctcggcggcacctttttatggccgatgctggcgctttctaatatcgcacaaggttcggcggctctggccatgatgtttatcgtgaaggatgagaaacaaaaaggcctctccctcacatcagggatttctgcttatcttggcattacagagcctgccatctttggggtgaatctgcgatacagattcccgtttatcattgcaatggtcagctctggcctggccggaatgtatatttcttctcaaggtgtgctggcaagctccgttggtgtcggcggcgtgccggggattttctcaatcatgagccagtactggggcgcgtttgcaatcgggatggctattgtattgatcgtgccgtttgccggaacatacgcgtatgcgagattcaaacataaataacaaatggggagcgggacgtgttgaacgttcccttttcccattttcaatttaaatatggtggtggagacagatgaaaacagaacaaacgccatggtggaaaaaagctgtggtttatcaaatttatccgaaaagctttaacgatacgacgggaaacggtgtcggcgatttgaacggcattattgaaaagctggattacttaaaaacacttcaggtggatgtgctttggctgacgccgatttatgattctcctcagcatgataatgggtacgatattcgtgattattactcgatttatcctgaatatggtacgatggaggattttgagcggctagtgtccgaagcacataaaagagacttgaaagtcgtcatggatcttgttgtcaatcatacgtcaacagagcacaaatggtttcgcgaggcgatctcttccatagacagcccgtatcgtgatttttatatatggaaagacccgcaggaaaacggttctcttccgacaaactgggaatcgaaattcggcggctcggcatgggagcttgacgaagcatcgggccaatactatttgcatctgtttgatgtgacgcaggctgatttgaattgggaaaatgaagaggtcagaaagcatgtctatgacatgatgcatttttggtttgaaaagggaatagacggctttaggcttgatgtcatcaacctgatttctaaagatcagcgctttccgaatgcggaggaaggcgacggccgctctttttacactgacgggccgcgggtgcacgaatttctgcatgaaatgaacgaaaaggtgttttcacattatgacagcatgacggtcggtgagatgtcttcaacaaccgtagaccactgcatccggtatacgaatcctgacaataaagaacttgatatgacattcagcttccatcatctcaaggttgactatcctaacggcgaaaaatgggccttggcgccgtttgattttttgaagctgaaggagatcctatctgactggcaaacggggatgcacgcaggaggaggatggaacgctctgttctggtgcaatcatgatcagccgcgcgttgtatcaagatatggagacgatggcgcatatagggtgaaatcggcgaaaatgcttgctacggccattcatatgatgcagggcacgccttatatttatcagggcgaggagctggggatgacgaatccgaagttcactgacataagctcctatcgggatgtcgaatcgctgaacatgtataacgcctttaaggaaaaaggaatggctgatcaagatattacagccattttacaggcgaaatcccgtgacaattccagaacccccgttcagtgggatgctacggaaaatggtggttttacaacgggcacaccatggataccggttgcaggaaattaccgggaaatcaatgctgaagcggcgctgagggatcagaattcggtgttttaccattatcaaaaattgattcagattcgcaaaatgtatgacattgtgacagagggtacgtatgagataattgcaaaggatgacccgaacatttttgcgtatctcagacacggcagcaatgaaaagctgctcgtgatcaataatttttacgggacagaggcggcctttacactgccggactctttagcgcctgacgaatggaaggcagaggtgctgttgacgaacgatgaagcaagggaagggcttcagaacatgacgcttcgcccgtatgagtccattgtttatcgtttaacgaaaccgtgttaaactaagctgggtggtccataatgaaggtgaataaattcatcacaatttataaagacatcgcacagcaaattgaaggcggccgatggaaagcggaggagattcttccgtctgaacatgagttgaccgcacagtacggtacatcaagagaaacggtccgaaaggcgcttcatatgctcgcgcaaaacggttatatccagaaaatcaggggaaaaggctccgtcgtgctcaatcgtgaaaaaatgcagtttcccgtttcgggccttgtcagcttcaaggagctcgcgcaaacgcttggcaaagaaacgaaaacaactgtacacaaattcgggctggagcctccgtcagagctgatccaaaaacagctccgggccaatctagatgacgacatgtgggaagtcatcaggtctagaaagattgacggggaacatgtgattttggacagggattattttttcagaaagcatgtccctcacctgacgaaagaaatttgtgaaaactccatatatgaatatatagaaggagagctcggtctttcgatcagttacgcccaaaaagaaattgtcgccgagccgtgtacggacgaggacagagagctgctcgatttacgcggctatgaccatatggtcgtggtgagaaactacgtctttttggaggataccagtttgtttcaatatacggaaagcagacaccgtctcgacaaattccgatttgttgattttgcgcggcgggggaaatgagagaggcgcctgcctgcggcagcgcgcttttttgtttggtatcaaaattgatactatccaacaaaaatgtgcgtacttttactttttatcataatggctacaatagagatgtgagtaatctaaaggagaggtgttttacatggcagatctaaagacacaaattctggatgcatacaatttcaggcatgcgactaaggaatttgacccgaataaaaaagtgtcagacagcgattttgaatttattttagaaacaggaagactgtctccgagctcactcggccttgagccttggaaatttgtcgtcgtccaaaatccggagttccgcgagaagcttcgtgaatacacatggggcgcgcaaaagcagctgccgaccgcaagccatttcgtcctgattcttgcgcgtacagcgaaggatatcaaatataatgcggactacatcaaacgtcatttaaaagaagtaaaacaaatgccgcaagacgtgtacgaaggctatttaagcaaaacagaagaattccagaaaaacgatttgcatttgcttgaaagtgacagaacattgtttgactgggcatcaaaacaaacctatatcgcgcttggcaacatgatgactgccgctgcgcaaatcggtgttgattcctgcccgatagaaggcttccagtacgatcacattcaccgtattcttgaagaagaaggccttctggaaaacggaagcttcgatatttctgtgatggtggcatttggctacagagtgagagaccctcgtccgaaaacaagatctgctgttgaagatgttgtgaagtgggtttaaataaagaaagctgctcgctaagcgagcagctctttttttatgcctgattcgctctattctgttttctcctctgatgtaagtacattgccgttccgagtgcgctgataagaaatccggccaataggatcgagtacatggatgtggctgtgtccggaagcaggccgccagccggaccgtctgttcctgatccgcccgaaccgtttcctccagagccgttagtcggttgagtgccaggaggcgtatcatttcctccgtttccgtcagttggctgttttccgcctggtttgtcggagccgccgccatgattgccgtcatcaccgcctgtcggttggtcggacgggaatgccggcggtttgttgttcgaaccggaatttaagatcgtgtattcgctgaagtggtttgtatatcctgtcaccatatcatcgtcaactgatccgttatctgtctttgtgaaagctttctttttcctgtcgacatgataaatggcagggttatgggcttcttcaatatcaaacatgcgaagcgaaagctgaacgggctccttgaatgattttatttcttttcctttttgctttactgtaaagtcatatacatctgccaatgacacattcaattctcccgtcgacttgattccgattgcagtgtctgcagttttaaggttcgccattggcatcttcatgctgtaccagtagttgaacaccgtcaatgaaggatctgactctctttctttcaaaagtttgacctgatctttttttactttgagattgataggcttctcttgagatccttcatgtgttccataatagacaaatggcgtgttggcatttttagcgtaaatcgcaaatttgtcttcatcaagtgtccagctgccgtcctcctgctttgtcggcaggaatacttctttgatccgtccttcaactttaggagagaccttgtttcctagttttttcagctgttcggtgaaaatctcataatcaacgtagccaaggtcttcaccatgggaggcttctgtaaagacagaatatccgtctcctccggcaccaacaaaattatttgttgccacgcggtaggtatcatccgtatttatagcaactttgtctccgttaggcgattcaattttcacttctaacacacggtgtccaggtttgttgtttaatgtaaaggtatattcgattccggccacctgagggaaagcgccgccgccattttccacattgcttaggccttgttcaagggcttctttaatttgttttccggttaaatcggccacgtaaagcgtattgccgaacggcatcacgttgagcacctcgccgagtgtgatatcacctttgtcaatgcctgctctgatgccgccgccatttgttatcgctattctggcgccggctgcttctttcgcttttgccagcataccgtccgcgatgaagtttccgagattcgtttctttcgtgcgcacatgctcacgctggccgtcaagcgccacatccgtgtagccgactttttcattttttacgtcctctaattcatttttgaactgatcgagctcttgttttgcttctgggttttcttctgtatgttcatcaattggcagcacgctcagatttgatttatctgtttgcacaacgcctttttcatcaaacgcgacatcaacgcgccccaagaattggccgtattcttttgcctgtgccacgatcgtcggttcttcgttgtttacgacctccattttgtcaacgagggtgtgagtgtgtccgccgatgatcaagtcaatgccttttacttttttggctagctcaagatcacggttatgaccgatatgggttaaagcaataattttatttacctgttcttcttcctgaatcgctttgacggtgttttgggctgtttcaaaggcatcattgaatacgatgcttttgcccgggcttgatgtggtggctgtatcttctgttgtcaggccgaatacggcgactttctccccgtcaacgtctaacagaatgtaaggatggatgccggcctccttcttttcacctgccgtaaaggtttgcggctttttgacaaatgatttcagcttggactcatttgtcacatctacgtttgcactgacaatcggaaattccggcgcttcaaagtgatagcggttcgccggatcaacggttgcgctgtttccgcttagaaaatcagaaagcactgtcgggcctttgtcaaattcatggtttccgaaggtcatggcgtcatagcccatcatgttcatcattttcagatcggccaaaccgttccatttagtaaaatacagatcgccggaaaacacatctcccgcatcaaggagaatattgtgatttgtttcgctgcgtacttcgttgattttcgtcattcgtctcgctgcatcatcgagatgtgcgtgcgtatcattggtgtgcatgacggtcaggtcccacagtccgtctttaggaggatctggatttgaatcatcatcgaattgcagcttatacacaccatagccttcattcgcagacttgcctacataagcgacatcgtctgctttatcggcaaatggcttggccaaaagcgaggattcaaacgtcagattcgtgccggaaacaggcgcgattgaccagttgttgtctgcttttggattgactgttttttgttcaataatgtaatccatcagcacctgcctgttttcaaccgcagagccgtggacaattttattgctcgtcagatgagggaacccgccgcctccggacgcacgatagttattggtgactacgagaaattcctggcttgggctgatcggcttgccttcataggaaaggttgatgatacgggatgaatccgcattgatcacttttccgttctcattgtatttagccggttttgtcacatcgacctgatatgtgacaccgtcaatcacgtcaaaattataggaacggaaattctcgttcagcaaggcctgatcgccgcctttggctggatcaatttgattgaattggcctgccgacatctccagccagtccttcacttcgctgcctgtcagcttgacgatttgaacagtattatcgtaaaggtacaagtcaccgacatttttaatcgcaagatctccggctggaatgtttgtatagtaattggctccatttctgccgcctgctttaaacggcgctccagcggataaaatcggcaggttcttgtactcggtatccttcatttctttttcggcataccatttttgcgcgtcagtcacgatctgaatggaaggatcatctttgacctgtgcaaagaagctgttaatatctgcttcggttttgccgactggctttcggacatactccagtgtgttttggtgtgtttgctgaatggtgtttgtaacggtttcgtttcttgatgtgacgttgccagcaatagattcaatacttcctttggaatctgctaccttccatgagccgtccgccttttcaagcttgaggtcaatcacgcctaaatatttgccccagctgcttggcatgacgacaggaatgccgttaattgttcccttttccacatcaaattgagcaacacccgcatactcggaggaaggaaagagtccgtgctgatggcccgagataatcgcgtcaatgcctttcgttttagtggcaaggtcaaacacggcgttttctgcgcctgatgattgtgactgcttttcaatgccggtgtgggcgagggcaataatgacatctgcgccttccgccttcattttcgggatcgtttcattggcggattctacgatatcctgcacctgaacttgcccctcgagattctttttgtcccatgtcatgatttgcggcgggacaaagcctatgtagccgacttttactttctgctcattaccgttttcatcaatgagggttttttcattaatcatatacggcgtataacggttttcgccgctagttgttttgacgttggcatttacaatcgggaaatcggctcctttgattgtgccgtcgagaaagtcgagcccgtagttgaattcatgattgccaagcgttccggcgtcgtatttcagcgcattcatgacgctgataatcggatgggttttcgcgccggagataatatcgtctttttgatatttcaccgcgtattcacccagcggattcccttgaatcaagtcgccgttatccacaagaagggtgttagggttttgcttgcggtgcttttggatcaattgcgctgttctcgccagaccgaaatccgccgtttctttgtcgctgtagtaatcgtaatccatcatgttggcatgaatatcagtcgtagccaaaatactcagatgcacctgaggagccgcgctttcttctgcatgaatgggtggtgttgggaggattaggctaagtatcataattgggggcaaaagaatacggagaatgtttctgacgtgtgttcgtcttttctgtattctcaccagttctccacctttcaacgaaatttgtgttacagctcctattgtaagaatattttgtaactatttgtaggtgtttctttatgattattgtaaaagggagaaaaatgagtattatgtatcagtatcaagcgacaaatactgggtatttatgcttatcgtttgtcacaatcgcggaatgtttattttagtgtggctggggtagagtgttttatgtagacatataaagcgggaggttatgaatcatggggaaaaaaattgcagttgttttaacagattattttgaggacagcgagtacactgagcctgcgaaagcttttaaagaagcgggacatgaactgactgtcatcgaaaatgaaaaaggaaaaacagtaaaaggcaagcagggaaaagcggaagtgacggttgacgcgtccattgacgacgtaaatccttcagactttgatgcgcttttgattcctggaggattttcaccagaccagcttcgcgctgacgatcgtttcgtccaatttacaaaagcgtttatgactgacaaaaaaccggtattcgccatttgccacggcccgcagcttttaatcaatgcgaaagcgctcgacggccgaaaagcgacgggctatacgtccattcgtgttgacatggaaaacgccggtgccgacgttgtggacaaggaagtggttgtttgccaggatcaattggtcactagccgcacaccggacgatataccggcatttaaccgcgagtcattggcattgcttgagaaataagaaaaaacggacgcccacgggcgtccgtttttttgttgcttaggcttgagcacctgtcagtttcttgtacctgtaatacaagaaagcagctgcagccgttccgatgaccgcaatgccgaagtcgaatatgaaaatatgagcgatgccccccgcttttgcgataagccctgttgcaatcggcagcagaatcgatgcaagacttgaagcggtcgctacaattccggtaacggttccttttcgcttccagaaaagctctgtcattaacgtaatggtaatttgaaacacacccgcagttgaaaagcctaagaaaaaggcagtgatgtccagcacaactgggatatgaacggtcagcatgactgcgagcgtacataaagtaataataggatataagagcgttatgaagacaggtttgacccatctattcagcaaaacggctaataataaaacagatgccagagatcctatactataatagctcagcaattgtacagatgctgattcagctaaaccggctgctttttgcgcgtagctcgggagccagatttgagaaaccgtaaataaagccgtggatgtaaaaccgatgataatcagtgcggtgccttctttctgaaaaacgggttcagacaagaaaacgggagattcctgttggccgctattagttggtttcttatgttttttaggaaacgaaagcgttgataaataaataatattcaggagatagaccgctgccggcagataaaaagcaaatccgtaaaacatgctgtggtctgctaaaaatgtgatcaaaagcggcaaaagtgcggccccgacagacataaaggccttgaccaagacattcgccgaaccggaagcagtcggaaagagctcagttagggccggatatgttccggcatccatcgctgaatttgcgactccggctaataaggcgaacacaaacgccagctcatagctcggtgataaaggaataccgactaaaaagacggccataattcccgcagaagcgacaacaagcggctttctgccgattttatctgatagaactccggaaatgccgtatgtcagcagtttgccaaacccgatagcggcaatgacataactgatgccggtcggatcggtattccactgttttgttaatgaagacatattggatgcgagaatgatgttgaccatccccagaaagaagtagttgatatacattccggatgctgttttgatagatgtcgtttgcatgcttgtactccttcaaatcttattcgaacactttgctgttttggtttggggaaatgataaaaaagactcgccgagtttccggccagtctccattatttacgaagcgaggctaattcttgagcaatcgcctgcatttcacttgggctgaatgattcttttttcatcaccatgctgtgaaggtacgtgaggtcttcaatcttctcatcactgaaatcctccgctttgattacgccgacgttcagcatgttcagcttttgggaaatctcttcaatcatttgagttaatgtttctgtatttgggctggacaaatggttccatcctttctatgcgcaatataggtatgttttattctaacagaattccatcagaaaaaaaccctattctaaaagcaggctgttcattccaaaaaagtgaagacatcagttgaaaagaaaatgaacatcctactaagatattcatgaaggtttctttttagagaaataggggcaaagaatagggaggttggacaacatgataagcgtgttatttgtttgtttaggaaacatttgccggtctccgatggcggaagcgatttttcgggacctggcagccaaaaaaggattagaggagaaaatcaaggcggactcagcgggaatcggcggctggcacatcggcaatccgccgcatgagggaacgcaggagatattgcgcagagaaggaatcagctttgatggcatgctggcgcgtcaagtcagcgaacaggatctggccgattttgattacatcattgcgatggatgcagaaaatatcggaagtctcagaagcatggcgggatttaaaaacacttcacatatcaaaaggcttttggactatgttgaagattcagatcttgccgacgttcccgatccttactacacagggaattttgaagaagtctgccaattaatcaaatcgggctgtgagcatctgcttgcgtctattcaaaaagaaaaacaattgtgagtgaaaggagaatttgcatgaacaacgaacgtttaatgctgaaagggatatttctcggagctgcggcaggtgcggcgttatcactgctccataagccgacaagacaggcgtgcggcatgagatggctgacatgcaagcataaactttcactgtacaaaagcaatccggagctgttaaaaaacactgtcatcacaaaagtggatgaggccaaaaaactcgcccaaacgctttcaaaggaagtcgactttgtgaaccagcaggtgaaagagctgaagaaaacaacgccgcaagtgatggaactcgtgcaagaaacgaaagagcatttttcaaaaaaatgatcaaacatgcgaggtgagacgacatgagttttttgaaagagcttttcagcagatacacccttcatgaaggacaaagtaaatcagcggagctggcgtatttttttctattgtcactgtttccgtttttgatttttatgctgacgctcaccgcgtatcttccgctttctaccgatgatgttttaggagtcatagaacaatatgctcccgccagtgcgatgtcactcgttgaatccattacccatcaaaccttaaataatcgaaatggcggtttgctgtcattcgggattatcgccgcattatggtctgcgtctaatggaatgaacgcgatcgtccggtcgctgaaccacgcgtatgatgtggaagaaaaccgctcttttatcattgttcgtctaacctcgatttttttgacgattgccatggtatttacgattttagtggctttgcttctgccggtatttggccgggagattggaaggctcgcttctgactttgtcggcgcgtcggatctgtttttatccgtctgggccgccattcgctggggtgtcagcccgcttgtgcttttgattgttttttccgcgctgtatgtgattgcgccgaacaaaaagctgtctctccggtttgtcatgccgggtgcggtctttgcgactatcggctggatcattgtcagcacattgttttcattttacgtcagcacgtttgcgaactatagcgccacttacgggagcatcgggggaatcatcgttctgatgatttggttttacttgagcggcattttaattatcctaggcggagaaatcaacgctcttttacataaacgtaaaaagcttcctgatgaaaatccctaccattagcgcaccctataaacgaacttcggttcaaaaagaagtcggggggatatcgtgatgaccaagcatacgaaaaaaggcggaagccataacaaacaaaattcgaaaagcaaatcgagcaataaaacaagcggaagcgccaacggacaaaacggctaccattagcataaaagcctcctgacatgatgtcgggaggctttttgattaagaagatgaagaataggtttcagccggtgaccagcttttcggtttgcccagcacaagggccagccacacagcgctaagcgtgagagtaatgaagtagaacaagtttgcgctttcaaatgtctgcatataccagccgccggcaaccgggccgaggatgctgccgagactgaatgtaatgccgcaaagcaggttccccgccggcaggaggtgaggcggaagaaggtctgtcatatagctgatgccaagtgtaaaggttgatccgactgccattcctgcaataaaaaagcagccgccgatcacgtaaggcgaaggaaatacaccggcgatgaaaaagcaaagagccccagtcagcaaaatcaccagcagcacattccgcctgccgtatctatcgctgaggatgccgagcggaaactgaaagataatgcttccaatcgcaaatgcgggaaggatgatcgctactgcgtctactgatatccccaaacggagcgcgtacaccggaaggcttccgttcagcgccgtttccagaaagccgtagccaaatgtaggcataaaggcaacccacccaaacagcatggcctgataaaatcgcctgaaactattgtctgatttggtttcatgaggactggtttccgggtatgcattttgtagaaagaaaacaaaaagccacgcaaacagactgatgcagccggacacgataaaaggaagcgacggactcagcttgacaagcggcaccatgaatgggcctgcggcaaagccaaggccaaaggaaagcccgtaaatagacagatttctcccgcgattttgttttgatgacatggaggtcacccacgtttgcgtagaaaagtgaagcatgtggtcgccgattccaatgaacaggcgaagcaggaaccagacccaaactgactgaagccaaataaatccgaataagcttaaaatgacaatgcttccgcccatgacgatcagcggcttgaacccgagctttctgagcggcgcttccataaacggcgaagccaaaagcacaccgatatacagcccggtcgcgtgcaggccgttgatagcagcggattctccatttgtttcaaaaatgattgaaatgacaggcagcagcatgccttgtgaaaacccggaaatggatacgagcaagacaaggataaagaaatgaaatcgtgacatcgtgtcagttctccttatatggaatctatgttgatcgtacaatgttttccaaaagcaggcaacctgaaaaaagcctatatcacgctatacatttgccctcgtgtaatcatgaaggtttttgtgaagaataaaaataaaacaagtcataaaaaaggagctatttcaccatgaatcgtatcttttttattttagtggcggccggtgttccgctttctgtgattggcagtttgatgcattggccttccgcggttctatttgcagtttattgcgtgacgattatcgcgcttgcaagctatatggggagggcgacagaatcactgtccatcattgcaggaccgcgtatcggcggtttgttgaatgccaccttcgggaatgcggtggagctgattatttccctttttgcattaaaggaaggcctgacaggaatcgtgcttgcctctttaaccggttcagtgctggggaacctgttgctggtagcgggcctatcgttttttgtcggcggtttaaaatataagcggcaggaatttaatatccatgatgcccgccataactccgggcttctgatttttgccatcattgtcgcctttgtgattccggaggtattctctgttggtatgggaaacgccagcaagctcaatttaagcatcggcatcagcatcattatgattctgttgtatgtggcggcgctgtactttaaacttgtcacgcatcggggcgtttatcagccgaataatgccgctcagactgaagaagaggaagagccggaatggtcagggaaggttgcgacgattgtcttgtttgcggcaacgattgtggttgcatacatatccgaaaacctggtccatacctttcactcggttgctgaacagttcgggtggagcgagctgtttatcggggtcatcatcgtggcgattgtaggaaatgcggcggagcacgcgtcagcgattattatggccttcaaaaataaaatggacattgcggttgaaattgcagtcggctctacgctgcagatcgctatgtttgtcgcaccggttctcgtcatctgttctatcttttttccgacaagcatgccgcttgtatttacattgcctgagctcgtcgcgatggtatcagcggttctcttgatgatcgcgatttcgaatgacggggattccaactggtttgaaggggcgacactgcttgctgcatatgtcattatggcgatcggctttttccttctttaacctgaaaaaatgatggataacaacaaagcgggatgaaaagactaagggaaaatgccatagaaagagtgatatgatgaaaaagctatttcattccacacttatcgtgttgttattctttagttttttcggcgttcagcccatccacgcgaaaaagcagtttaaggttcctaattctgtcgcaagcatttcaaaggaaaacacgtatccgaatgcttcacaggatcagccaatgcttcagccgagcaagctggcaaaggaattgctcgatcattctgaggtgaagattgaaaatccgcatctcatcaaaatgctgaatgaatccaacatatccggcacaccgcttgcagtagggtatcgggcgacaatatttctcgggaaatgggcgctcggctatgaatcaaatgaaacagtcgcaaactgggaatataaaaaaatcaatacaaaccgtgcggataaccgcggcgggaaagaaacggctgaaatgcattatgcccaggaacagcagtacagagtgaagggcggcctgacagctaaagttccaaatgctgaagatgtcaaaagcatgatgatgcaaaaagcaatgaagaaaacgaaccttccgcttgcatttgagacggtcattggggctggcacaaaacgggatcagatttataaagtcgctcctaaaaaaatcggttatttacatgcatatgcaccggctgtgaatgaaaaaggaaaagtgacttacggagaagtgtacttagtgctgaaaggaaataaacgaaaactcgtcgtgaaaaatgtcacgtcacagggcatcggtgcgtggattccggttcaagatcatgtcacatttggctttcagctttcctcactgccaagataaataaaaaactgattccaactcggaatcagtttttttgtttattgggttctctcgattcggaccgcttcctcaagcatttgcacattgttttggtagagctggcgaacgagaacccgtctgactgcaaggctggcactgaaataatcatcatctttcaccatgcctttaaccgtaaattcgacgccgcgattgattttattcaatgcggtgatgccgtggatttgaaacggttctgtcggattgccgaattcatcccgcttcaatgaatcacgaagctcttcattcagcatgtcacatgcctcttccaacacgctgtacacgcggtccggatcttctttaaagctgataagaaaggattcggtaatccgcataaaatcaatattatagttctctatttgtctgacctcgccgttgctgatggtgagcagcttcccgctccattcccggatttgcagcgagcggaggccgatttcctccactgtcccgttgaacaagttgttgacggtgacataatcgcctttgtgcagctggcgttcatatattaagaatacaccagccagcacatctttgatcagcgattgggcgccaaaaccgatcacgatacctgctacgcccgccccggccaatatcttgccgaaatcatgcacaaataaagaaataacgtaaaagataaaaccaattgttgccgtatactgggtgacagaacggacaaggctttcaatcgttttttcctttttttcttcaataaaatccgtccgtttaaaaaatagctgtaccagccggttgatgataaagacaccgatccaaaggataacggcaacgaggagaatatcgacgattttattttgaaaaatctccgtaagtgtttctttcatccgcatctaactcctggcttgacgttttgtgaagtctgtatcctgataataactgtttttgacaagaacattcggtccgaggcaccggacattcgggcagtggcaacttagttccttcgcaagcttggtctctctccacttttcataggcggaagggaggctgtccgtctgaatgttgccaagcggcggggtatcaccgaaatcggtcacgataatgtttccgtcgaaaatgttcacattcaggcgggatcggccgtcagggtcatttcgcactgtgacgtttttcgccgcgcgaagccggcgaagcagcttttggtcgtcttcgtccggactgcaggcataaaacggcagcgttccgaacagcatccacgtattttcatcacgaatatccagcaagcggtgaatggcctgtctcatctctttcaggctgagggattcaagagcgcttgcgaaatcgcttggatacattgggtggacctcgtgacgctgacatttcatatcttctgtgatttggcggtgaatatgctcaatatgcggaagagttcgtttgttcagcatcgtttccgcagataccattactccggcatccacgagcgtgcggctgttttcgatcattttttcaaaatagcgcgcgcgctgttcgaaggtcggttttctgtccatcatggcaaagccgatttcagcaaaatcttcaactgtaccccagttatgagaaatatgtagcacatcgagatacggaatgatccattcgtaccgctcgatgtcgagggtcagatttgaattaatttgtgtccgcacaccccgttcatgggcatatttcaataaaggaacaacatattcttttactgatttcagcgaaagcatcggctctccgcctgtgatgctgatggatctgaggcgcgggatttcctccagccgttttaacagaagatctattggcagagcattcgggtctttaggctgcaatgtatagcctacagcacaatgctcgcatctcatattgcacagtgtcgtcgttgtgaattcaacgtttgtcagctgcatgtctccgtattggtcaacatccatataggcttcccaagggtcaaactcgggcgtaatcggacgcagcttcgtgttttgtgtcatgactatctaactcctttataaatgggcatactaacgctgccaacagttaattttagacctgatttgccaagatcgcaagtagcgcggcgattgaaaaacggcaaaaaatgagctaccataataaaaaatgaatggaggaacagaatggggaacgccgtaaacaataaagatcagcagattgattatttaaagaacagacttgacatgtttatgaacgtcatcgattcattagaccctgaagcaaccgacgttgaagatatagacaggcttatcagcatgcttgatgacctggaagccaaatacgaacgttttaaaaaagattgggaataaaaccgcgtgcccgccgcggtttttttattggcataaagcaacagtataaaacaaagcccctatctgtaaaataagaaaaaatgcagaaggagcgctggccatgaagtggatgtgttcaatatgctgcgccgccgtattgcttgccggaggtgcagcacaggcggaagcggtgccgaatgagccgattaattggggctttaaacgaagtgtcaatcatcagccgccagatgccgggaagcagctgaacagtttgattgaaaaatatgacgcgttttatttagggaatacaaaggaaaaaacgatttacttaacgtttgataacggatatgaaaatggctatacgccaaaagtgcttgatgtcttaaaaaaacatcgcgtaacaggaacgttttttgtcaccgggcatttcgtaaaggaccagcctcagctgatcaaacgaatgtcagatgagggccatattatcggcaaccattcctttcaccatccggatttaacgacaaaaacagctgatcagattcaggatgaacttgattcagtcaacgaagaggtttataaaattacgggaaagcaggacaacctgtatttgcgtccgccgcgcggcgtgttcagtgagtacgtactgaaagaaacgaaacgcctcggctatcaaaccgttttctggtcggtcgcttttgttgattggaaaatcaacaaccaaaagggaaagaaatatgcctacgatcatatgatcaagcaggcgcacccgggagccatttacctgcttcacaccgtatcgagggacaatgcagaagcgctggatgacgcgattacagatctgaaaaaacagggctacacatttaaaagcattgatgatctgatgtttgagaaagaaatgaggctgccgtctttgtaaaagagaaagacctctccttaaacggagaggcttttctttattttatacatttaatcagtgcggcccagtccagatccccgaagcctttctcaatcccgttttcaaaatggcttttggccagctcggcaagaggaagatttgcagaaacccgttttgcggcggcgagtgccaggttggtatccttcagccctaaagacattttgaagccggccggctcaaatttctgctcggccataatggttccgtaattttgatagactggagaaccaaagagcgcgctggcgatttctaaaaattgtttttgttctaagccgtatttctccatcattaagaaggattcagataacgcctccagcatagacacgagtaagaaattgatgctgattttcgctgcatttgctatcttgctttcttcgccgacgtcaaatacctgctggctgaggctgtcgagcagaggcttggcggtttgcttcgcttccgccggtcctgctgttatgatgcgaagcgcggctttggctgcggcatccggtctgccaaggacgggagcggcgagaaaggattgtcctttctctgcatgagccgctgcgagcttttctgagaactcaacactgattgtgctcatcgagatgtgaatgccgttctctgctaatccttcaagcagcccgtcttctccgaatgtcacggtgctgacagaatcatcatctgcaagcattgtgatgacaatatcagcggactttgccgccagccgcggcgtatcagctgcctgtgcgccttctgtgacaaggtcttctgtcttttgtttcgtccggttatagacagtcaattcgtagcctgcttgaagaacatttcgggcaatgggctgtcccatattgccgagtccgatgacagcaattttcaatctgatcactccctgaatattttttccattataaacaatatgaacagaatatgcatagcgatcggcttataacaaaaaagaacagcttcccgctgccctcatttaaaaatattgaaccatcctttatgtacaaaccaaatcagcatcccgattacaagcgcagccatcaggccaagtacagcaaaatatccgtatttccaatgcagctccggcatgaagtcgaaattcataccgtatacaccggcaataaaggtgagcgggatgaaaatggttgatacgatcgtcagtgtcatcataatcgcattcatccggtttgagtttagcgtcacgtagctgtcacgcaagtcagacgtcatgtcacggttggattccacaatttcagataactttaacaaatgatcatatatgtcgctgaaataggctttcgtttcccgctgttctttcacatggtcaaggcttaaaatccggtagagcaaatcacgcatcggaataatcgtccgtctcaaatgcaataggtctgttctgagatcaaacacctcgttcatcagcgttccatacgttttgtggggacggctttcttcaatttcattcagccggtcttcaattttatacacgagaggaaaatattcatcaacaagctgatccatgatcatataagaaatatgcccgggcccttttttcaatatatccggtgaagcatacaaacgctcccggactttagcgataccgggcgtttcgtgtaaatgaaaggtgacgacaaatttttcgccttgaaagatatcgacttcctccgtctcaagtgtttccttattcagcgcatgaatcacgtaaaaacgatagccgtcataatggtcaagcttcggccgctgcatatgctggaagcaatcctcaatggcaagcgggtgaaaatgaaaaaaatctctcaataacgccgtttccgtatcctccgggccgtaaaaatcaacccagtaccatgcaatatcaggctgttccactcgttcgatcggtatatttttcagcagctgatgctctgttgtgattgcggtaatgttgatcataaacaaccctccacctgccattatatcatgcggtctttatgagaaaagtatacggtactctctgcctaattcaagcggcatgttatactgaacaaaaacggaaaaaagggtggatctcatgtggaaggaaaaagtatctgtcacgcctccgtatcattttgaccgcgtgctggacaggctgtctttagaccccctcaatgctgttgatcgagaggcgagggaagtccgtgtgccaatcagaaatcaagcgggggacgtatgtattgtaaaggtacaggcgttaggccatgcgggcgagcctgagttcctcgtcagcggggaaacggatcagggagaaatgatgaaggaaatcaagcggatttttcaatgggaaaatcatttgcagcacgttctggatcatttttcaaaaacgagcctgtccgccatttttgaagagcatgccgggacgccgcttgttctggactacagcgtgtacaactgcatgatgaaatgcattatccaccagcagctcaatctttccttcgcttacacgctaacagaacggtttgttcatgcgtttggcgagcagaaggatggcgtgtggtgctatccaaagccggaaacgattgcaaaactcgattatcaggatctgcgtgatctgcaattcagcatgagaaaagcggaatacaccattgatacatcaaggatgatcgcagaaggcacactcagcttgtcagagctgccgcatatggcggatgaagacattatgaagaaactgatcaaaattaggggtatcggcccgtggaccgtgcaaaacgtcctcatgttcggacttggccgtcccaatttattcccgcttgccgatatcggcctccagaatgccatcaaacgccactttcagctggacgataagccggcaaaggatgtcatgctggcgatgagcaaggagtgggagccttatttaagctatgcgtctttgtatttgtggaggagtatagaataattcgtctgacaatgaaggaaatcctgcaaacgtgttatactagaaagatgtgaaaaaaccatttcactttctgccatccgcagaaagcttcatatagaaacggagagaacaacgtgaaccaacaaaagaaacaggcgcccgtcgaactgaaggtcggacaaacctttccgctgacgattaagcgtctcggcattaacggagaaggtgtcggctattttaagaaaaaagtcgtcttcgtgcccggcgcgcttcctggcgaagaagttgttgtgcaggccacaaaggtccagccgaagttttcggagggccgcattaagaaaatccgcaaggcatctgagcaccgggtggcaccgccttgccctgtttatgaacaatgcggcggatgtcagcttcagcaccttgcatacagccagcagcttcgggaaaaacgcgatatcgtcattcagtctcttgaacgccatacgaagtttaaagttgaaaacatggaaatcaaagaaacgattggcatggacaacccgtggaattaccgcaataaaagccaattccagatcgggcgctcgcaaagcggcagcatcatcgccggcttatacggccttgattctcatgacatcgtgccgattaaagactgtatcgttcagcatccggcaacgaacaaaacaacaggcatcgtccgccgcattttagaggacttcaatgtgtctgtttataatgaaagaaaacgaaaaggtgacgttcgcacgatcgtgacgagagtcggctttgaaacaggcgaagtgcaggtcgtgcttgtaaccgcaaaagaaacgcttccgcacaaggaagaaatcgtcaaagcgattcaaaagcgattgccagaggtcaaatccattattcagaatgtaaacggggcgaaaacttcagtgattttcggtgagaaaacaaaaccgctcgccggaaaaacagtgattcaagaagtgctcggcgacgtatcttttgaattgagcgcccgcgctttcttccagctcaatccggaacagaccgtcaagctgtatgatgaagtgaaaaaagcggcgcagctgaccggaaaagaaaaagtcgttgatgcgtattgcggcgtcggcactatcggcatgtgggtggcggacggagcgaaggaagtccgcggcatggacgtcatcaaggaatcaattgacgatgctaagaaaaacgccaaaaaacacggcatggcaaatgccacatacgtaacaggaacagccgagcactggctcccgaaatggacgaaagaaggcttccgcccggacgtcgtcattgtagacccgccaagaacgggctgtgacagcacgttcctggacacgatcaaaaaagtcaaaccgaaacgctttgtctacgtttcctgcaatccatccacgcttgcgaaggatttgcagacgctgtcgaaggactatcgcgtggactatatccagcctgtcgatatgtttccgcagacggcgcatgtggaagctgtggcgagacttgtattgaaatcgtctcattaattcctaatcagatctggatttcggcagaatgaacattgccgatttccgggtctttttcgtgcatagcccttgtcctaactgtctgttctcaattttatcttccttctcattctcggagatctttattttaactggcgaaaagagttgaaaaaacgtgttgaaaagcgggtgaaaataagcgttatttaaccgggaaaatatcctcccagtatgattaaaatacatgagtaaaataatgtaaaatcatagatatattttcataatttgtaaaattatatattgacttgcagttattatgtgtgaaatattgattataggaatataaggaaaggtatggcgtatatcatttcaagagtcattcgatgtaaaaagttgaaacattgtaattaaatgaaagaggtgaaaatgatggccaaccccattttaaaatgaataatgtatgagcactacaacaattaaataatagtgccgacgataacaactattacagtaatacctacaatggttatatccttgcgacaatcatgcttcataataatttagattgacacttggctaaaaagtattgcagagaaggaaatggataactaaatggataaagtatataaaaaacgaccgttatataaaagaagttggtttcaaacatttttggcatttttagtatctcagctttattttaattttgtagaattaacgggagggggtcctaagtatagagaaatgaatggattcccagcaaacatagttgaactagatttctttcaaacatatctttcattctatgataatccatggtttaatattattactgttttcttgggagttttcactattatacaaataattacaggggtaacaaaggatattcgaaattaaagcaataacttctgatgccttatttaataatgaaagaaaatgtacactttcttaattatcttatgagtgaagactgcgacacttagtcagcagtctattttattggttctggatcaggcttaccgaattataaccctatacaaatatatagtaggttgccacttgctgcgttggttattttctaaatcatgagcaaatgccaaatgattcagattgaagttcttgaattcttttaaataaggatttattttctcttctcatcctctttactccatgtgattcataagtggtagcagcttaagtagagttttttttattctcttgagtactcagttataccacccccaactcaatttgcttaatcaaagtttatctcttgaaattagtttttccgcaaatatgatattgagatacggatatggtgtagcgttaaatatcttatcctcaataacaggacaattagtttgcgttggtaatatggagaactcatatgatattctatttaggttggaatcctttttatccaaaaagttcaaaagcaaggccactaagaaagacgaaggtcagcgccagtgttaaccacaatataaaaaatagggtagctaatcatcccacgtgaaatgttcaaaatttactatagattgataagaaatgctttcgcatgcgataagtgtaaaagaagcatggtcagttttttaatattgagatacaggtatagccgtatcccctaatgaaaggatttgatttttgttatgacagaaaatttctggcgtgaattaccacggccgttttttgtactggcaccaatggaagatgtgacagatgttgttttccggcatgtagtaagtgaagcaggcagaccggatgtgttttttacagagttcacaaactcagagagctattgccacccggatgggaaggatagcgtgcgcggccgtttgacttttacagaggatgaacagccaattgtggcccatatatggggagataagcctgaaaacttccgtaaaatgagtattggcatggcagagttaggatttaaaggactagatatcaatatgggctgccctgtgcctaatgtggcacagaacggtaagggaagcggtcttatccgccggccggaagttgcagcagagttaatacaagcagcaaaagcagggggattgcccgtaagcgtaaaaacaagacttggtttcacggatgtagacgaatggcgcgagtggctgacacacatactgaaacaggatattgccaatctttctattcatctgcgcacaagagcagaaatgagcaaagtagatgcgcattgggaactcatcccggagattaagaaacttcgtgacgaggtggcaccagatacattgttaacaataaacggggatatccctgaccgccaaactggcttaaaacttgctgaacaatacggtgttgatggaattatgattgggcgcggtatttttacaaatccatttgcctttgaaaaggagccgaaagagcatagcagcaaggaattgcttgatctcttaaggctgcatctggatcttcatgataagtattcagcattagaagcgcgtccgtacaagcctcttcctcgctttttcaaaatttaccttcgcgggttccgaggggcaagtgaattaagaaatcaatgcatgaacacaaagtcaacagatgaagtgcgtgcattgctcgatgactttgagagaaagtatcttgatggtttagagtaacagcagtgcttgattcaaaaaaggctaacaccattcttgactaaaataaacctggatgttcggtaaaataaacaattccgatttccgggtcttttttgtacgcagcttttactcagcctgtcttttctctaatttattgtaagaaaataatggtatatttagtggagataacttataaagggggagaggaaaatgaaacgactatgcatcatcccctgcggcaagaaaaaaatctgggacgtccagcctgatgccgggccggtaagagcagaggacgcttatctcagcccgtttcatcaggtgtgcgagcggtatgcgaaagcatttttcgatgagtgggtgattttgtctgcgaagcacgggttcctccgccctaatgatctcgtttcgggaaattacgatgtcacttttggcaccggtcatccggaaatcatgacagcggacgagctgagccgccaatttcacgaaaaaggcttttctgatatcgaagagctagtcatgcttggcggaaaaaaatatcgaagcgttctaaacgccgtcatcggagagcaccagcatatcagctggccgctatcatcatacaaaggcataggctacatgctccaagcgctgaaccgagctgttgaagaaaagcatgaactgtagcacgtatataagaagaaaagagtgtgaacatgaaaaaacttgtgtttggcttgcttgccattgcgttattcggatgcggactatatatctatcatgtatggttcggtgatccattttcgaaaaatgctgcagaacagaagctagtctcttatgtgaaacaaacctatcctaagaaagaaatcaagatcacgaatggggtatataacgctaaaacctctgaatatgtattcgaagcaacctcccaatctcatcgctacccaatgtgtacgaagggatttctgcatcctaaagtaacgtgcgatggaattgaagaagcgtataccgaatcagtatcaaaacatgtaaatgaagaagcaacgaaggcaatcgaagcagatctgaaaaaagcggttcctcgacttataaaagctgatgctgctttgagtatcgaaaacggacagttcacgttagatacaaaatggaacaaacagctggctgaaaaagcgcctatgagcatgacgattcagttagacgccagcgggttatcaaaaacagatgccgcaaagatggcggaaattgtcagaaaaacgcttaatgaaaagggatatacatactcaaacggcacgatagactgtatgcagaaggacggggacggcggtatcggatatgtcaaatattcaattgattttctttcaaaagcagctattcagtcaaacgatgcagaggaactaggaagttaaaaagatttccaaggaaataaatacgtcgatcattgtcaaaggccgggtgatatccggtctttttttttgcatgctgtaaaacgagacaaatgaatcagtttgagacaaaacgagacacacgtctcaaactgtctccaaagtgaagacgagaagactgattttacgggctcaaaagactggcacacttcttgcatttataatggtgaaccctaaatagaaggaggcgcacaaaatgaaattgttaaaacgagaaggcttgtcattaactgaggaaaaagcgctgtggatgtaccaaaagatgctggagatcaggggctttgaagacaaagtgcatgaactgttcgcccagggagtgcttcccggattcgttcatttatatgccggtgaggaagccgtggctgtaggggtgtgcgctcatttacatgatggcgacagcattacaagcacccacaggggacatggacattgtatcgccaaaggctgtgacctggacggcatgatggcggaaattttcggaaaagcgaccggattgtgcaaaggcaagggcggttctatgcacattgcggatcttgataaaggcatgttaggcgcaaatggaatcgtcgggggcggctttacgctcgcatgcggatcagcgctcacggctaaatataaacagactaaaaatgtaagcgtttgctttttcggggacggggcaaataaccaaggcaccttccacgaagggctgaatttagcggctgtatggaaccttcctgtcgtgtttgttgctgaaaacaacggctatggcgaagccaccccatttgagtacgcatcagcctgtgattcaatcgccgatcgggcggctgcttataacatgccgggggttacagttgacggcaaagatattttagcagtttaccaggcagccgaggaagcgatagaaagagcaagaaacggcggcggcccgtctttgattgaatgtatgacctacagaaactacggccatttcgaaggagatgcccaaacctataaaacgaaggatgaaagagttgagcaccttgaagaaaaagatgccattcaaggttttaaaaactaccttttaaaagaaacagatgctaataagctgtcagacattgaacagcgtgtcagcgaatcgattgaaaaagccgtctcgttcagcgaagacagcccatatccaaaagattcggagctgctgacagatgtgtacgtgtcatatgaaaaaggaggaatgtaagagatggcgagagtcataagcatgtcagacgcgatcaatgaagcaatgaagcttgcgatgagaagagatgaaaatgtgcttttgatcggtgaggatgttgccggcggagcggctgttgatcatttgcaggatgatgaagcatggggcggtgtattaggagtcacaaaggggctcgtacaggaattcgggcgcacaagagtgctggacacaccgatttctgaagcgggctacatgggtgcggctatggctgcggcatcaaccgggctgagaccgattgcagaattaatgtttaatgactttatcggcacatgctttgaccaggtgatcaaccaaggggcgaaattccgctatatgttcggcggtaaagcgcaagtgccgattaccgtccgcaccacatacggagcgggatttcgggccgctgcccagcattcacaagcgctgtatggccttttcacgagcatcccgggactgaagacggttgttccatccagcccgtatgatgccaaaggtctgctgcttgcagcaatagaagacgatgatccggtgttcttctttgaagacaagacgtcctacaacatgaagggcgaggtgccggaagattattatacaattcccctcggaaaagcggatatcaaacgcgaaggcaatgatgttacgctctttgcagtcggcaagcaggtcaatactgcgcttgaagcggctgcacagctttcagagaggggcatcgaagctgaggtgcttgatccccgcagtctgtctcctctggatgaggatgcgattttcacatcgttagaaaaaacaaaccggctgatcatcattgatgaagccaatccgcgatgcagcattgccacggatattgctgcgattgtcgctgacaagggctttgatttgcttgatgcgccgattaaacggattacagcgccgcatacaccggttccgttttcaccagtgcttgaagatcaatatttgccgacaccagataaaattgtcagcgtcacgcttgaattgcttggcgagccggcaatgaattaaaggggggacacaaatggcggtaaaagtagtgatgccaaaattgggaatggccatgaaacaaggggaagtatcgatatggaataaaaaagtaggcgacccggttgaaaagggagaaagcattgccagcattcaatcggagaaaattgaaatggagatcgaagcgcctgaaaaaggaacgctgatcgatatcaaagtgaaagagggagaagaggttccgcccggcacagctatctgctatatcggggacgccaatgagtcggtgcaggaagaggcgagtgcgcctgttgctgaagacaatatgccgcaagccgttcagcccgtcaaacaagaaaacaaacccgcagcctccaaaaaagatcgaatgaaaatatctccagtcgccagaaaaatagcagaaaaagcaggattagacctaaaacaactgaaaggaactggaccaggcggacgaatcgtgaaggatgacgtaacaaaggctcttgctgaacagaaaaaagatcaggcaaagcctggttcggaacagaaagcgcaggaaatcccggtgacaggcatgagaaaggtcatcgctgcccgaatgcaggaaagcctggcaaacagcgcgcagctgacgatcacgatgaaggctgatatcactaagcttgccactcttcaaaaacagctttcatcaactgcggaagagagatacggcacaaaactgacgatcactcattttgtctcaagagccgccgttctcgctctgcaagctcaccctgtgctgaacagcttttatcaaaatgagcgcatcatcacacatccccatgtacaccttggtatggctgtagccttggaaaacggcttagtggtgcctgtcatccgccatgctgaaaagctatcgctgattgaactggctcaatcaatctcagaaaatgccaaaaaagcacgcgagggacgtgcgggaagcgaagaactgcaaggctctaccttctccattacaaaccttggcgcgtttggagttgagcatttcacaccgatactaaatccgccggaaacaggcattctcggcatcggagcaagctatgacacgccggtgtatcaaggggaggagatcgtcagaagcacgatcctgccgctcagcctgacatttgatcacagagcgtgtgacggcgccccagccgctgcattcctgaaggcgattaaaacatatttggaagaacccgcagcattaattttataggaaaagcaggtgaaaacgacatgacattagccattatcggcggcggacctgcaggctatgcggctgcggtctccgcggcacagcagggcagaaacgtgctgctcattgacaaaggcaagcttggggggacctgcctgaatgaaggctgcatcccgacaaagtctttgttagaaagcgcaaacgttcttgataaaatcaagcatgccgacagctttgggatcgaacttccggcaggtgcgatatcagtcgattggagtaaaatgcaaagccgaaaacaacaggttgtcagtcagcttgtccaaggcgtacagtacctaatgaagaaaaatcaaatacaggttgtaaagggaacagcctcctttctttctgaaagaaagctcttaatcgaaggagaaaacggaaaagaaatcagagaggcggaccaagtattgattgcctccggatcagagccaatcgagctgcctttcgctccgtttgacggcgaatggatcatcgacagcaaagacgcgctttctctttccgagattccgtcttcactagtcattgtcggcggcggtgtcatcgggtgtgagtatgcagggctgttcgccagattgggatcgaaggtgaccatcattgaaacagcggaccagctgattccggctgaagatgaagatattgcccgtctctttcaggagaaacttgaggaagacggtgtcgaagtgcatacttcatccagattagagcgggtggatcaaacggccaaaacggcaatatggaaaagcggtcagcgagagtttaaaacgaaggccgattatgtgctggtggcgatcggcagaaaaccccgtcttgacggattacagctggaacaggccggagttgatttttctccaaagggcattccggtgaatgggcacatgcagacgaacgtgcctcatatttacgcgtgcggagatgctatagggggcattcagctggcgcatgccgctttccatgagggcatcatcgctgcttctcatgcttccggaagggatgtcaaaatcaatgagaaacatgtgccgcgctgcatctatacgtccccagaaatcgcgtgtatcggaatgacagaacgacaggcaagaagcatatacggggatgtgaagatcggcgaattttcattttccgcaaacggcaaggcgctcattaaacagcaagcggaaggaaaggtcaaaatcatggctgaaccggaattcggcgaaatcgtgggtgtctcgatgattggcccggatgtaaccgagctcatcggccaagcggcagcgatcatgaatggtgagatgacggcagatatggcggagcattttatcgccgcccatccgactttatcggaaacattgcatgaggcgctgttaagcacgatcggccttgcggtacatgcataataaaggaaaaagcaggcgcatggatataaggcgccggcttttttattgttgaaagcgctttatttttcccctacaatagatgaaaacggcgtgtaagggaggagcgatcaaggaaatgaattcggtcccaaacgatttgcaaacctggaaacgttttgtgaaagacggtgtgcttgacgaagcccgattaagaaaacggattgcagagtcatggcatcgctgcaaaaaagctgaggtcaatccttatttagaaaaaggcccgaaggttttacagcaaacggagctggatcagcagtcaaaaaaacattcattcttcttgacgaccgcaaagccttacctcgaaaaactgctgcctgccataaaagaaatggaaatgatggcgctgctaattgatgcagacggtgttgttctggcattggacggccatcccctcgcgctctatgaagccaaacgcatcaactttgttgaaggggcatgctggacggaaacggctgtcggaacaaatgcgattggcacggcgctccacatcagcgagccggttgcgatacaaggatcagagcattactccattgcttcccatctttggaactgttcagccgctccgattcaccatgaggatggcagccttgcgggtgtgattgacatatcgtgtccggcggcaggcgctcatcctcatatgctcggtattgccactgcgatcgcctatgcagctgaacgggaacttgcagctaaaagccgtgagaaagagctcgagctgatcagccgttttggagagagggctgcatccagtgtgccgatggtgctatgcaataacaagcagcacatcatcagtgcgagcataccgattcgaacctcaatgcctgattggcagggccggcacctgtatgagttgaaggaacggggctactcaatcgaaaaagctgtcaccataggagatggcggcacttgtttttatctttcggaacaaaagaaaaagaaggtgttccgattcaatggagtgatcgggaaaagcggccgatcgcaagcgatgctgatgaaccttgaacgtgcagctgcggcagatgcaacggtctgtttgtcgggcgaaactggtacgggaaaggaagtcgcggctcgcgctcttcatgagaacagtgagagacgtcacggtccgtttgttgctgtcaattgcggagcgattccgtctgatttgattgagagcgaactgttcggctatgcagagggcgcttttacgggagcgaaacgaaatggctataaaggcgcctttcaaaaagcaaatcaaggcacattatttttagatgaaatcggagaaatttcccactcgatgcaggttgcacttttacgggtgcttcaggaacgcaagataacgccaatcggcgggacgaaagaaattccggttgatatcagagttattgccgccacacattgtgatttacgcgagcttgccgaaaacggaaaaatcagagaggacttgttttaccgtcttcatgtctatccaattgaactgcctccattacgcgatcgcaccgaggatatcccggacctctttgagtactacaaacagaagaatcattggccaggcgaacttccttctgatttttgtcatgtgctgaagcaatggaagtggccggggaatatccgtgagctgtttaatgtgtttgaacgtctttctatcagatttccggacggccggctgagggatgaaccgcttcccgctttactggaagccgctggattgccggccagctctgcagaaaaaaagccggctgctgccggcgtgcttacctttcgtgagcaaatccaaaaggatatgatgatcaaagcgcttgaatctgcaaaaggaaacgtctctcaagctgccaaaatcagcgggattccccgaagcactttctacaaacgcctgaaaaaattcaacttgtccgctgaatcgtaaagcatacttccttcaggaaatggaaacgttatgtattgaaggagggtgttacgatgaatattcaaagggcgaaagaaatagtagaatctcccgatatgaaaaaagtaacatataacggcgttcctatatacattcagcacgtgaatgaagaaaacggaacagcaagaatttatccgcttgacgaaccgcagcaggagcatgaagtgcagctgaacagcttaaaagaggattaaacaaaaatggcccgcttcataagcaggccattttgttatccgcgcggcgcaaataaaataacacagacaccgatgagacaaatgaatgcgccgatccagtcatacagatcaggtgttttccggtcaacaagccatccccacaggaccgcaagcacgataaatactccgccataagcggcgtatacacggccgaaagatgggaaggactgaaacgtcggaagaatgccgtatacaatgaggatcagcgccccggcgattccatagccggctggctttgcctctctcagccatagccaaaccagatatccgccgccaatttcggcaagccctgccgcgagaaataaaagaatggtaatcagcatcatgagcactcctcaatttgcatttatctttcattatagaggaggagagcttttaaagcttcggatgattctcaaattccttcaaatacgcttttcgctgaacctctgtaaattggctgatccaattgttttgagcctcttcattcaaatggggaaggacatagcgttcaaccgcttcgaaaaacagcggattcgcgatgatgttccaggtcgggatgcgaacgattttcccgtctgttttctcgatgataatatcctcaaaaaagatccctttcagactgtattggtgacgtcccatataaagccgcttcacctcggaaaacagcacgctgcgctttctcgagaagatctcgccactaggtccggtctttatgctgaaaatgacatttccacggcttgtgaacgcaggaaaagccataaagaatgtgatcaatccataaattatcgccagtaatccgccgcccaaataaagcagggcatatttagattcaaacgtgagagcttcagccaccagccagactcccacaataaaggcgccccctgtagcgaggaacagccatattctaaaaaacagtctgcttttgaccttaatgacttcattgtttttcaattgctattctcctttatcgctctttagcaaaaagtattccttttatcacatctttatttgctgttacgatagaaaattcattttgggtaatacctgttaccagccaagtatgacggctgccaggcaggacgaaagccatgtcagctacttctggggagttgtctttgtcataaaccagccgcatcagcgtatccatttttccttttcgcaaagccagatcatttacaaaacgggtaacgtcctcttggtgatcatgcttatctagaaactccttgagatgtgtgggagtgtctgaagcgccctccaaaagcaattcaaattcagttgatgtcagagagagcattgattctttgtgatcttctgcatctattatatttaaaaactcggatgttttagagagtaatccattagttgaatccatttttttgattctatgcacctgttcatcaaacagcaattcatgagagtaagtgccaaactttgaaacatggcaggatatattctgttctttgccttgttcatcaaatttggacagcttcactgtatagtccgcgtcgtttaacacatggataaacggacagtattcgtcctttagccgatattgatgattccgatattccgcagcgtccttggctaagagtgagcggcacgcggcttcaaataaggcgccgagctgttcatcttctatttcgggaaaataggcttgttttaaggccattccctgttcgaaaaacccttcgctgtaaaaacaaaacaagagttcttctatgctgattgtaaactgcttcattgtttattctcctatccaaatgaaaatttccctttaaggaaatgggttgcgccgtgtatgagcgaatccgctgttttctttgctttttctattccttttttcgcactgtctatccctttatgtatcgttttattcgccgcatctatgccgtcattcactgatttgacgactttgccggctgattccagtccttttttggctgtatcaacgacagcatggatcggttctttaagttttatcgctgctttttcagcatagactgatgtgaattttgcgattttttccccaacaaaccctcctactgccgaaccaattgtgcctccgattactgtgcctacaggacctaacacacttcctacggcaccgcccacaacagcaccagctgtcgcaccgcccgcaataaaaatggtgttattcacagcatttccgacagccttggcgttttcacgcttgagaacttcgggtttattctggtattttgcataattttcagcaattttcacgcctgctccgaatgtttcggtcgcaccggtaatcagtgtggcggtaatggcatttcctttcgcgaatctcaagcccgtttttcccacatccttcaaagtggagcgtacgccggcttcattaagaaatccttttgtgtagcttctgacgctgtttgaaaaatccaccgtgtcctgagggaagtattttgtaaactttttatgtaccaaatctgaaaatggacggttggtcttttttaacaaatatttaggattcaaaagcactcttgccgctttttgataacgtgagctgtcaacggccctggaaatatccaagagcagttttgagtgctgggctgtatgcaagccgcttggctgtttcacaaatttcgtaagccctaatccgtaatattttccctgcgtcagcataagagcggttaagcttgtcatcgtaccgtatttgtcgtaggcattgtagagctttcgcaaaatatcatcttgttccacaaatttatcgcctgtttttctgatgaaaatctcattgtcactcagcttagtgacgagcgcctttcctgagctccacgcatcgcccactccagaaaaacagctgctgtagcggggatcgcattgcaaaatcatctgccccagctccacatgcaggtccttatatttgttttccatatcagttaattcagtgactacatcatttgcaagctgttcgagcttatccggatcaactgcaatgtttcctgacacaccgttcacctcccgagtttatgtctttcctctcttgctttacgctccagttcttccattctggcaatttcagcttttcgttcttctattttgacagcggcagccttcagctcttggcttgtttcaagcagctcctgttcgaattgatcgtaggcggctttcgtttcctcgaaatcctggtcaaacgaatctcttgatttgccctgccaagcatctcccaatgcagataaccgggattcaagcaacattttggagcttctgacctcttctgcggccgcactgtacttgtttgccagctcaatgactttatatgagtccaacttttgtcccctgccttttctaaattcacgcacaattggatgttttatataaatgattataaataattcggcatgtatccgaatcgtacaaaagaaccttttcataagaattggaagggcgtatattcacttaaaattcacagttggtgagactttaagattacaaaaaaggtaaaaaaaacaaatccctcagacataaggcaaatgagaaatttcccgctctatgggaaaaaacactaaagttgatcaaatgacctaagtgcgccaaacgtgttacgggacgggctatctcatggtataaatggaattgtaaacgttatcaaggaggtcgtcatatgaagaaaaaatcattctcaatcgtaatagcgggcggagggagcactttcactccagggatcgtactcatgctcttggaccatttggaggagtttccgatcagaaagctgaagctgtatgataatgataaggagagacaggatcgaattgcaggcgcctgtgacgtttttatcagagaaaaagcgccggatattgaatttgcagcgacgactgacccggaagaagcttttacagatgtcgattttgttatggcgcacatcagagtagggaaatacgcgatgcgtgcgcttgatgagcaaattccgttaaagtacggagttgtcggccaggagacgtgcgggccgggcgggatcgcatacggtatgcgttcgatcggcggtgtgcttgaaatattagattacatggaaaaatactcgcctgatgcgtggatgctcaattattccaatccggcggcaattgtggctgaagctacgagacgccttagaccgaattctaaaattctcaatatctgtgatatgccggttgggatcgaagaccggatggcgcaaattcttggcttatcctcaagaaaagaaatgaaggtccgctattacggattaaatcacttcggctggtggacatcaattcaggatcaagagggcaacgatttaatgccgaagctgaaggagcatgtatctcaatacggctatattccgaaaacagaggctgaagcggtggaggcgagctggaatgacacattcgccaaagcgcgtgacgtgcaggccgcagatcctgatacactgccgaatacgtatttgcaatattatttgttcccggatgatatggtgaaaaaatcaaatccgaatcatacgcgggcaaatgaagtgatggaagggcgcgaagcttttattttcagccaatgtgacatgattacacgtgagcagtccacagaaaacagcgaaatcaaaatcgatgaccacgcatcatatatcgttgatcttgcccgggcgattgcctacaacacaggtgaaagaatgctgttgatcgttgaaaataacggcgcaattgcgaactttgacccgactgcgatggtcgaggttccatgcattgtcggctcaaatgggcctgaaccgattaccgtcggcaccattccgcaattccaaaaagggcttatggagcagcaggtatccgttgagaagctaactgttgaagcgtgggcggagaaatcgttccaaaagctgtggcaggcgctaattttgtcaaaaacagtgccgaacgcgcgtgtggcaagactcattctcgaggatttaatggaggccaacaaagacttctggcctgagcttgatcaaagcccgacccgtatatcataactgaaattcccccattttcgaatctgtaattgtatataatagaaagaaaatggggggatctgatatgcagctcgaagaactgatcaatcagcactacagcaaattgaatgacaacgattttcatattttaaaatatatattgaatcataagcacacatgctatcaccttggaatcgacgcgctggccaaagcttgcagtgtatcgcgttcctcaattttacggcttgcccaaaagctcggtttcagtggctacagtgaatttcgcgtctttttaaagtgggaagatcagccggaagaaggcgagagtatgagttttgaaaagctgcttgatgatattgaagcaaatttgaagttcttacggacaaaggacatgacggacatgtgccagctgattgatgaagctgaccgcattttcgtctacggttctggaaatgcgcaaaagatatgcgcccgcgacctgcaaagaatgtttattccgcgccatcgctatcttattttaattgaagacacaaatgaatttaatttgatgcgcgatgattttaaagtaaacgatctgtttatcatcatttctctttccggagaaacaccggagctgattcctcaggcaagaatgctttctgcaaagggtattccctttatttccattacgaatttaaaaaacaatgtcctcgcccagctgactccgcataatctttatgcgacaagcaaacctgtgacattaagcgataaaacggaaattgtcgcttttgcaccgttttttctcgttggcgaagcattgttccgcgcatatgttgattacaaagaggcagaaaaaaatgacaatgagtagcagggggttctggtatgatgcaaaaaattcagcgctttggaagcgcgatgtttgtgcctgttttattattcgcgttcgccggcattatcgtcggtatcagcacgctctttaaaaataaaaccctcatgggcccgctcgccgatcccgacggtttttggtatcagtgctggtatattattgagcagggcggctggactgtttttaaccaaatgccgctcttattcgccatcggcatcccggttgctttggcgaagaaagctcaggcacgcgcttgtttggaagcgcttactgtttacctgacattcaactattttgtcagcgcaatattgacggtatggggaggagcatttggcgtcgacatgaatcaagaggtcggcggaacgagcggattaacgatgattgcgggcataaaaacgctcgataccaacattattggagccatctttatttcttcgattgtcgtctttttgcataaccgctattttgataaaaaactgcccgattttctcggcatctttcaaggctcaacatatatcgtgatgatttccttctttattatgattccgattgccttggctgtgtcttatatttggccgatggttcaatcgggaatcggctcgcttcaaagctttctggttgcttctggggcggtgggcgtttggatatacacgtttttagaacggattttaattccgaccggccttcatcactttatttacacgccgtttatttatggcccggctgtagcggaaggcgggatcgtcacgtattgggcacagcatctcggcgaatattcgcaaagcgccaaaccgctgaaggagctctttccgcaaggcggattcgcgcttcacggcaactcgaaaatcttcggtattccgggtatcgccctggctttttatgtgacagccaaaaaggaaaagaaaaaactcgtcgcagggctgctgattcctgtcacactgacagcgattgtcgccggtattacagagccgattgagtttacgttcttattcatttcacctttcttatttgcggttcacgccgtgcttgccgccacaatgtcgacagttatgtatatggccggcgtcgtcggaaatatgggaggcggactgattgaggcggtaaccttgaactggattccgctctttggcagccacggtatgacatatgtgtatcaaattttgatcgggctctcgtttacagcaatttattttttcgtcttcagatttttaatcctcaaattcaatatcgctacaccaggacgggaaaaggatgaacagcaggaaacaaagctatattcgaaaaaggaatacagagaacgaaaaaacaaggatgaaacggcctccgctgctgaaacggctgatgacaccgcttttctgtatattgaagcgctgggcggaaaagacaacatcactgaagtcacaaactgcgccacccgcctcagagtcagtgtcaaggacgaaacaaaggttgaacccgacagcgtattccgcgcgcttggcgcacacggcgttgtcaggaacgggaaggcgtttcaggtaattatcggattaagcgtaccgcagatgcgggagcgtgtggaaaaaatattgaatcaataaagactgccctccttttcgggagggttttcgtttgccgtcaaaaagaccgccatagtaaagtaaagaaagagacaatcgagtaaaaaggggtttggaggcttttacatgcaaaaggctttgtcgtttttaaaaccatattcattgctggcgggaattgcgctgattcttatgttgacggagcttgcagttgaactgctgcagcctttattgattgcgaaaatcatcgacgatgggatattgaagcaagatctgcggcatgtttggatatggggcgcggtcatgatcgggctgaccgtgttatcctttgcggcggggatgctgaattccttttatgccgcccatgtcagccaaagcttttcctatgatacgagaaaagggctttttcaaaaaatccagtccttctcctattccacatttggacagttttcgtcctcttcttatattacaagactgacaaacgacgtcacacaggttcaaaatatgatttttatgagtttgcggtttatgctgcgggcacccttaatgattgcaggcggcattgtgctgtcgcttgccgttaatgtgaaactcggcttttttctgcttgtgaccattccgatcctgatcttgtttttgctatgggtattaaggaaaggcggggcactgttccgctcagtgcagaaaaggctggatcaagtgaacaccatcatgcaggaaaatttaattgcaatcaagctgatcaaagcgctgcttcgcggcagccacgaagtcaaacgatttatcaaagccaacacaaggctgatggaaaaaacggtttcggcctttcagcttgtggaattcacgatgcctgtactgatgcttttgatgaatctctgcatccttttgattttgtgggcggggtcctacagtattacgagcggaagcactcaggttggcgatgttgttgcgataattaactacgcaacacgaattacaggcgcgctttcgatgtttccgtttttgattatgattttcacccgggcgaaggcttcaggggatagaatcggtgaggtgcttgaaacagaaggcgacgagcgggaggaaggcaccatatctgatcgtttgtcaggacggattgagtttcagcatgtatcctttcgctatcctgaaatggacagagaagcgctcaggaatgtctcattttccgcaaagccaagagaaacgatcgcgattctcggtgcgacgggctcgggcaagtccacgctttttcagctcattccgcggctttatcagccggattcaggccgcatttacatagatgaaaagccggttcaagatattccggctgaagggctgcgcaggcaaattggatatgtaccgcaggaagtcctcttgttttccggcacaatcaaagaaaacatcgcttggggcaaagaaaatgcttcactagatgaaataatggatgcggccaaacatgcgcaaattcatgaaacgattttgaagctcccaaatggatatgacacagttttggggcaaagaggcgtcaacctgtccggcggccagaaacagcgaatttccattgcgcgggcgctgattcgaaaaccggctatccttctattagatgacagcacaagcgcacttgatctgcaaacggaggcgaagctgcttgaagcaatcagcacataccattgcacaactttgatcattacacaaaaaataaccacggcgatgaaagctgatcagattttgctgctagaggacggcgaactgattgaaaaaggcactcacagtgagctgctttctgaatctcagttatacaagcgcatttacgagtcacaattcggaagggaggggagcgagtcatgctaaaagacatccgcaagcctttccaatatcccaaactgccaattgacaaaaaagaaggcgcgaaaaagcgggccaaagcaaaggatacaaagggcacactgagacgaatctggtcttacttggctgaaagaaaaggactgctcatacttgtcatgctaatggttgtcatcagcgccatattcggactccttggtccctttgtgatcggaaaggccatcgaccattttatcgtcgggaaaacggtcagcggcttgattcctgttttgcttcttctgcttgctatctatatcattcagtccctgtcgctttggtttcaaaactattggatgattacgatctcgcagggcacggttttcagaatgagaagcgaattgttcacccatctgcatgagctgccgattccattttttgataaacagcggcacggcgagctgatgagccgggtgacgaatgacatcgaaaatgtcagttctaccttaaatacgtcagtcattcaaattttgtcaagcgtgatcacctttgtcgggaccattgcagtgatgctgtacatgagcccgctccttacattgattacgctgaccattattccggtgatggcagcgagcctgaaatggatcaccaaccgaacgggaaagctgtttaaagaacagcagaaaaaccttggtgatctgaatgggtatattgaggaatctgtttcaggcgcaaaggtcatcaaagcatattcacgtgagaagcagattactgctgaatttctcgaaaaaaacgctgcactcaagacgtcgggcttttgggcgcagacgatttccgggtttatcccgaaggtcatgaactctttgaataacttaagctttacaatgatagcggcaatcggcggtttgtttgcgctgaaaggctggatctcgatcggctccatcgtcgtctttgccgagtattcaagacaatttacacgccctttaaacgatctggccaaccagtttaatacgatgctgtccgcaatcgccggcgctgaacgggtgtttgacgtgcttgatgaaaaagaagagcgcgaggatgaaaagaacgccgtgcatcagcccatccaaacaggcagcattgaattccgggatgtgtccttcggttacgataaagggcagcagacactgaagcatttacagtttaccgtgcctgccgggcagtccatcgcgtttgtcgggcctacgggggcgggaaagacaaccgtcactaaccttctcgcccgtttttacgagcctgacaaaggaaaaattttaatcgacggtacagatattaaaacccttactagagcaagcctgagaaaaaacatggggtttgttcttcaggattctttcttatttcagggaacgatcagagaaaacattcgctacggcaggcttgatgcttctgatcaggaagtcgaagccgctgcaaaaacagcgaatgcccatagttttattgaaaggctgccaaaagggtatgacaccgtgctgacgcaaaacggttcgggcatcagtcaaggacagaagcagttgatttctatagcgagggcggtgcttgctgatccggttcttctcattttggatgaagcgacaagcaacattgataccgttacagaagtcaacattcaagaagcgctcgcccgtttaatggaaggaagaacaagcgtcatcattgcccacaggctgaacaccattcaaagagcggaccagattgtggtgctaaaagacggtgaaatgattgaaaaaggcagccatgacgagctgattcggcaaaaaggattttacagtgacttatatgaaagccaatttgagaaatagacctttgtcctgcacagaggtcttttttgttacagttttatagtacttttatttcattttcgtaaaatgtaacaaaattacttgacgtaaacaagttatgtatatatactagcttacattaagtaagtgataacatttatcaaggaggataaaatgaataaatcatttgaaattggcacattacttttaagagttattacaggtattatcttttttgttcacggtttatcaaagtttcagggaatggagggcaccatccaatttttcggcagcataggccttccaagctttatggcgtatgtcatcgcagcgattgaactcattggcggagtgcttgtcttcttcggattggctacacgtattgtcggtgtactgttcgctcttacactgatcggcgccatcatcactgttaagctgaaagcgccattcatgggcaatgcagaatttgattaccttctgcttttgacatccattcacctggcgcttactggaagtcgattcctggcgctggacccatttgtgtttaaaggaaaaaagaacgaaaacgtttcagcataagaaaagaggcatgcagcatgaccagcattcatgaggatacacacattggctatgccaaactcacaattcgcagtctggagcgttcgcttcagttctactgtaacgtcatcggttttcaagtcttaaaaaagacggatcgccaagcggaattaacggctgacgggaaacgcgtactgcttattcttgaagaaaatccgagcgctgtcgtcttgcctgaacggtctgtgacaggcctttatcactttgcgattcttcttccggacaggaaagaacttgggatcgcgctcgcccgcctgattgaacacggcattgctatcggacatggagaccatgctgtcagcgaagcactctacctgtctgatcctgacggaaacggcattgaaatgtacgctgaccgcccccgcagcacgtggcagcgtgatcgggaaggaaactatgtcatgacgacaaccgctgttgacattgagggccttctggaagaggcaggagatgagcggaaaacatcgcttccgaacgatacaatcatcggacacattcatctgcatgtcagtgatttgaaagaagcaaaggcgttttatacagatgtactgggctttgacattgtcggaaactatgcgggcatgtccgccctcttcgtttcagccggggggtaccaccatcatatcggcttaaacatttgggcgggaagaaatgcgccgcctaaaccgacaaatgccagcggactagattattatactgttgtcctgccccaccaagaggagctggatttggtggcaaaccgagtcaaacacgccgggtattcgattgaagagacggaaaacagctttcgtgtgaaagaccctgtttccggcgcctatattacatttgtgatttaactgcaatccccttgccgaaaaaacggcagggggattttttattttccagaaactcctgtcaaaaatgccctgaggcaggtatgataagaagggaattgggtatcgggagtgatgagcgtgaaagctcttttttttacgagaatgttcaccttgatggtgagctgtttaatgtatctgtccattgtgaaagaggataactggtttggatatgtatttatagcagcaggtgctgccatgtatgcagccaatcatgttttgctgacaaaagagacaaatgccatctggttctgcctgattgatattgcaatcggcttttctttcggatttatctttcccggcacaggtttgttcattattatgctttgtccggttgcggtcgccttttttctgcggaggtttcctaaaagaacagcatggtctgtcttatgtctttcctctattttatttttgaccgtcctcatccgtacatatgcgatgttcggcaatgaatttgtcattgatcatttgactagcatgacattcgttgtcttctgcggtgtcgtgggcaaattaatccgcaagctgttggatgcgcaggatacggcaaaacagcagtttcaggaactgacggagtcccatctggcgctgtctgctgcacatcaggagctccatttatatgcgaagcaggttgaagagctgactgccatttacgagcggaacagaatggcgcgggaaatccatgatacagtggggcataaaatgacggcccttctcgtccagctgcagcttttgcgtgaatggcaaaaaagagacagccaaaaagcggatgagacagtaggtgtctgtgaaacacttgcccgtgaagcgcttgatgatgtccgcttatcagtacgcaccctgcaaactgaaaacgatccttcgctaatcgaatcgctgaaacagctgacagaggacttttgcaaaaatgcaggagtcacaacagaatttgcggtcagcggtgatcctgcaatcatcccgctgtctctccatccgaccctgatcagaacggcgcaggaagcactgaccaatgccaaacggcacggcggcgccgcagcttgttcgatacagcttgcctgcacaacggacagcatcagccttgtcattaaggatgacggcaaaggcaatcccgaggcagcacttggttttggtctcttgaatatgaaaaagcgggcagcggaacatggcggaatgatccgctttgaaagcgaacaggatcaaggatttactgtgaatgcagaattttcacttgccaataaaaaatggagcttcaggcccgtgcagcaaaaggagagtttattatgattaagatcatcattaccgacgatcaggatatcgtcagagaagggctggcatccctgctccagctcagagaagagctcgatgtgatcgcaacagcgcgaaacggacaggaagccttcgaaaaggcgaaagagctggagccggatatcgtattaatggacatccgcatgccggtttccaacggggtggagggaacaaaattaatcacaagctcattgcccggcgtaaaggttttgatgctgacaacctttaaggattcagcgctgattgctgaagcgcttgaagaaggagcaagcgggtacctgctgaaggatatgtcggcagatacgattgtaaaagcggtgatgactgttcattctggcggaatggtgcttccgccggaattgactgcccaaatgctgaatgaatggaagcgtgaaaaacagctgaaaggaataaaagagatagaaaaacctaacgagctgctcgacctgaccgagcgcgaaatcgaagttctggctgagctggggtacgggctcaataacaaagaaattgccgaaaagctttacattacagaaggcacagtcaaaaaccacgtttcaaatattatcagcaagctggctgtcagggacagaacccaagccgccatttactcggtcagatatggtatatctgtcttttgacatatgacgttttgcatatatgcttctctgaaaaggccttttacaggcctttttttcatgccctatgttctatctgccgctacatgccgcacgcctttctttcttctacaatggcaatggatcaaaaaaaggagtgagacgacgtgctgcaagcagaaaacatcaaaaaggcatatggaaaaaaaacaatcgtgaaaggtatttctttttccctccaaaagggggagtcgttcggtctgctcgggccaaacggtgcggggaagtccacaaccatttcgatgatttccggccttgtgccgcatgacagcgggaacatcacggtgggcggctatgtcatcggaaaagaaacggccaaagcgaaacaaaaaatcggcattgttccgcaggaaattgcattatatccgacgctgacggctcatgagaatcttatgttttgggggaaaatgtacggacttacgcacggcgaggccaaaaaaagatcggctgaggtccttgaatatgtcggtctgactgagcgggctaaagataagattgaaacgttctccggggggatgaaacgaagaatcaacatcggtgcggctttaatgcataagcccgagctgctgattatggatgaaccgactgtcggtattgaccctcaatcgagaaatcacattttagaaacggtcaaacagctcaacgaaacgggcatgacggtgatctatacgagtcattacatggaagaggttgagtttttatgcgatcggatcggaattattgatcagggggaaatgattgcgattggcacaaaaactgatttgtgcagccgccttggaggcgataccatcattcagctcacagtcagcgggatcgatgaagcgtttcttttggcgatccgttccctggctcatgtgaatgatgtaacagtccaggagtcagagctcaaaatcgacatttctgcggctcatcatgagaaagtcgtcaccagtctgcttgctgaagccgctgctcatcatataaacctgctgtctcttcaggtgcaggaaccgaatctggagcgcctgtttttgaatctgaccggccgcacgttgcgggattaggaggggcggcaatgaaaaaaagcatatggatcgcatggaaagatgtcaaaatcagaatcacggacagaaaagggtttatgatgcttatcctaatgccgctgatcctaacgtgtattttaggggcggcgctcggatcagttgttgacggaggcaaccggattgatgacatcaaagtcggctacattcaatcagaccagtcagatgcagcgaacatgtttacaaaagatgttctcaaaaaaatgaagtcgataaaggccacaaaagccggcagcgaagacaagatgaagaagctgattgatgaaaagaaaatcgatgtaggcatcgtcatcccgaaccattgggaagccggcaaaacctcagctgttgtttatgccgcacctgatcaaacattgaaaagttccatcatcgaaacagctgccagctcttttatagagcaatataaagcggtaaaggaagccgcgtcagcctcaatggactacatcagcaaaacggaagctgtacagcaaggaaaacttgaccctgcacagtttgcagaaaagctggcaaagacgctagaaaaagaaacaggtgacaagctgactattgcagaaaaatctgtcggcagcaaggccgttaccagctttcaatactattcggcggcaatgctttgcatgtttatgctgtttcatatgacagtcggggcgaaatcgtttttacaggaaaaggatacggagacgcttgccagaatgctgatgacgcctgcgcaaaaatccgtcattctcttcggaaaatggcttgggacgtatctgtttgctatcatacaatttttcatatttctgatcgtcacaatcaatgtatttggtgtggactggggcggtaatctgctgtttgtgagtgtactcgggctttcttacgccgcagctgtatctggtatttcaatgctgcttgcgtcgtgcatcagcgatatgaaatctgcagactcgataggcggcttcggcattcaattgcttgcggttctcggcgggtccatgctgccgctgtaccaatttccggacgtcttgcagtctgtatccaaagcggtgccaaatcgctgggcgcttgacggctttctttctttaatggaagggggaggctgggctgaccttcaaaagcctgtgcttctttttgcggcgatcggcttttgttcacttgtaattggtatcagacggcttcatacaagataaggaggtacaaaaggtgaaaaaaattctagccatttgcggcattgagctttctctcatttttaagaagccacagaactatttgatcatgtttgctgccccgcttttgcttacctttgtatttgggagtatgctcggcggcaatgatgataaggtgcggcttgcaatcgttgatcaggacgatacgattctctcacagcattatattcggcagctgaaggcacacgatgatatgtatacattcgaaaacgtgtctgaaaacaaagcgtcagaaaagctgaaacaaaagaaaattgccgggatcatcgttatttcccgctcgttccagacacagctggaaaaaggcaaaaaccctgaactgattttccgtcacggccctgaactgtcggaagcgtcgatggtcaaacaatatgcagaaagcacattggcaacgctcaatattcaggtgaccgcggcaaaaacggcatctcagacagcgggagagaactggaaggcggcgtataaaaccgttttcgccaaaaaacatgaagatacagttccggctgtaaaacggcagacgctcagtgataaaaaagagggcgcggaagcaagtgacacagcctccagagcagcaggtttttccatcctgtttgtcatgctgaccatgatgggagcggctggaaccattttagaagcaagaaaaaacggcgtctggtccagattgcttacagcctctgtcagccgagtggaaatcggtgctgggtatgtgctgtccttctttgtcattggctggattcaatttggcatattgcttctttccacccattggctgtttgccatcaactgggggaatccggctgcagttattgtattagtgtcactttttctattgaccgttgtcggcattggattgatgattgcggccaacgtcagaacgccagaacagcagcttgcgttcggcaacttgtttgtcatcgcaacatgtatggtgagcgggatgtattggccgatcgacattgaaccgaaatttatgcaatccatcgctgaatttcttccgcaaaagtgggcgatgagcgggctgacggagattatcgctaacggtgcccgcgtcacagatattctcggaatctgcggcattttgcttgcatttgctgcgatcactttcgcagcggggctgaaagcgctccgagcctaaaaaacatctgccgtttaggcagatgttttttagcatgtgggtacattcgtatgggtgtagcctgaactgcggttaatccttatctatcatagctaaaattgattccagccaagaaacgtaatttttctcccgctccagcgctttcgttagcacaagatagtggccgaagtccggtgaagaaaatgacatcggctctgctgaagccataagcttttcatagcttccctgtaagtcagaaagcttggcctgtcgtttttgcagctggtctttgaacaaatcagaagcctcctggcgcgatagacaagaaatgaaataagccttcagcataaattcatccttcaccgtctcgggtatcggctggtggcggatcagccagtcatgcagttcctgctttccgctgtctgtcagggtgtacatctttttctccagctttgtgccctgaatcgttgtccgaaacgtgataaatccttcatccgtcagctttttgagctcagggtaaatctggctgtgcttggcgctccaaaactggccgagctcctctttaaaataactcgtaatatcgtatccactcaattcgccttttcgcaaaagccctaatatggcgtattttaatactctcatgctatcctccgtgtctggctgtttcgcaaaacagatgagccggtgctcaactgtgattctaactgcctattccccttattatagaaaagggaggaagggaacacaaccgggctctttggaaatgaagataaaaggtttgtcagaaggtatccgatttatctccgtcaatataaaagagatttaaatttaattttcagaaaaaatagtaaccatattgattttttatgtataataggaaattggtggtatgaacatgttaagggggaataaacgtgaaaaaagtacttatggcattcattatttgtttatcgctgattctatctgttttagccgctccgccgtctggcgcaaaagctgaatcagtacataatcctgtcgttcttgttcatggaataagtggtgcatcatacaactttttcgctattaaaaactacttaatttctcaaggctggcaaagcaacaaactatacgcaattgatttttatgataaaacaggaaataacctaaataacggcccgcagcttgcttcatatgttgaccgtgttttaaaagagacgggggcaaaaaaagtagatattgtggctcatagtatgggaggcgccaatacgctgtactatattaaatatttaggcgggggcaataagattcaaaatgtcgtaacgcttggaggggctaatggtttagtatcatcaaccgcgctgccgggtacagatcctgatcaaaagatcctctatacatctatttacagtctcaatgatcaaattgtcatcaatagcttgtctcggttacaaggagcgcgaaacatccagctttatggcatcggtcatattggcttgctctctaatagccaagtgaacggctatatcaaagaagggctgaatggcggaggcctcaatacaaattaatatcttcaaaaaacaacctgctgtctccgttacagtgggttttttcgtctgagaaagccatagggtcttatgaccttagtctatcatgcatacgtcaatttatgacatcaggcactttttcaaatagagcggacatgttaaggtacaaccatcgatttctatcaatttgaaataaaaggagcgctgttatgcaaattaaagaaatttttatgatccgctgcatttcgtgcttaagtgtcgtcttgctccatatcatttcaatggtcctgatgcttcaggcagaagctcttgcagatatttctcacactgttgattctttccgcacactcctgatgttcagcacgcccgcttttattttcatctctgaatttttactggcccgttcttatcctgatggggtgcctgacggttttttaaagaagcggggaaaagtgatttttgttccttttttatttatcgcggccatcgatgcgctgctgatgaccagtgcgatggggggagaggtaacctttctcgcgtttgtgcaaaaatatctggcgaacgttttcttaggaaactttatcggatacttcattctcgtcatctttcaattttacatgctgcatatgatgtttcatgagtacttgaaaaaagcatcgccgaaatgggtgctgtctatctcatttgtggtgacagccgcttatttaggctatttctccgcagccagcccggctcctgcttctgaagagggaggggcatttccgttcttctgggttccgttcgcaggctggcttttctacttttgtctagcctactattgcggaaaagaatacaagcgttttttagcgctgctgaaccaataccgctgggtggtgtacggcggcgcaattgcttccggggcgctggttgtcactgtttcttatgtgggtgaaatcggcatgatcagctcgaagcggcctgatatcatgctgtattcaacaagcatgattttcctgtgttttcacttgttttccaaaatgaagcatgtgccgaaaatcatgatgtttatcagcaactattccttttcgatttatctgcttcatgcctattttatgattataggctacgtgttgcttttgaatatgcccgacattcctgccgtaccggctgttctcctgttgtttgccgtgtgcacagccggcccgattatgacttcatgggcgctgaataagttcaaatatgggtatttatttgtggggaaaatttatcagccaaaacagaagaaggtaacagtcgaagtgcgtgatcacgcagggtgaaaaacaagcggcaggggggatcctgccgcttgttgtgtattaaaacatacagtatacacaatctttttcttgtaaaataaaggagaagagtgaatagaagggagaacattcatgacatcagtcaatctaagctacccaataggagaatacaaggcgagggaatccgtatcgaaggagcaaaaagataaatggattcaagtacttgaagaagtgccggcaaaattgaagcaagctgtagagggcatgacggacagccagcttgacacaccgtaccgggacggtggatggaccgttcggcaagttgttcatcatctggctgacagtcatatgaacagctatattcgttttaaattgagcttgacggaagagacaccggctattcgtccgtatgatgaaaaagcatggtcggagctaaaagactcgaaaacggcagatccgagcggctcactcgcgcttttgcaggagcttcacggaagatggacggctctgctccgcactctgacggatcagcaatttaagcgcggattttatcaccctgatacaaaggagatcattaccctggagaacgcgctcggcctgtatgtctggcactcacatcatcatatcgctcatattacggagctttccagacggatggggtggtcttaacgcttttgccggcggaaagccggaatactgatagcagcaatcaccagaagtgagatcacagcagccgctgcatataactgatcatagccgctggcgacactcgcatgaatggcgtcgcttatcgcggttttgacttcaggaacgggaatgcgttcgatttgttcttgtaaagaagaaacatcagaactgtcgatctccggaatcatctgcatcgccttttctgaatatccgctgtccgataagcggctgttgatctcatcacctatttggtcaaacccggctgtgataaaacctgcataaagagtaggcgccaaggtcagtccaatttgccttactaatgaaagcgtgccaagagctgtacccttatttgtttttgccgcttctgatacaaggacgttcagcggagcgcctaacagaaagccaaaaccgatcccagctgccacacttgcgatcataaactcccatttttccgtcacccagaacggaaataaagcaaaccccgcacatgagatgattcccgaaagaataacggtttttacaggacctttttggtcggtaagcgctccgccaagccaagcgccgattccggaagccaacgcaagcggtgtcatccaatagcctgcttttgcggcagggacacccaaatactgttcgacatatgacgggataaaaatgactgccgccaagagccccccggataacaaaccgatgataagcgtgcgctgaaacatatggtttcgcagcagagaatacgccaaaatgggatcgcctcctcgcatttcaactctcttttcatacgagataagcgctgcaaaacagagtatgccaaaaataatacatccataaacctccggattccccaagctgtgtaagagatttgccccgtcaagattggtcatgccgtacatcacagctaaaatcgacagggacaaaaggaagattccggccgcatcgaggcgcttagcctcaggtgcttttgtttccgcgataaaacatgcgccgaaaacaaccaatagcacggcaatcggcaaattaatcaaaaacagccaatgccaagacccggtccaatcaagcagaaagcttccgatatttggcccgagcacagcggccatcccgttcattgcgccaagcagcccaagcgccttcccttgtttttcctttgggagggtcgcgagaatgtgagagctgccgatgatgaaaatcccgccgcctccaagcgcctgaatcagccgcgatatcagaaagagcgggaagctttggctcaaagcaacaagcaaagaaccaagtccgaacaggcaaacctcaatgagaaagagtttttttctgccgtagcggtcggaaagctttccgacgattggcacactgacgctaagaccgagcgtataaagggtaatgccccatgatccccaggaaggggaaacggaaaacgactcgtttatcgttgttaaggcagctgaaataattccgttatctagcgcagccataaatacaccaatcgtaaacaggctgatcgcccacttttggcctttctgctctgttaatgcttcagacatattcatcaacctcctttttattcactcaaagtatattattcattttaaatgaactaaatgtcaaataaaaaaagcctgctcccgcagtttgcggatgacagacttacagatttattcttttttcgctttctctaatgctcttgaaaggatagacagcccttcggaaaccgcctgcttttcttcaggggacagcagctctaatgaacgcttcaatttcaggtggcctttttcatacaaaccccggaaaatatttttcgcattttctgtcaactgaacaactacagagcggcggtcctcttcagaatgtgagcgtttgacaaaccctgatttctcaaggcggtcaagcagcccagttgtattggacagggaagcccccattttttcagcaatgtcgctcactttcaatgttccatggttgtttaatagcatcagcactttcatttgcggcatgctcatatccagcttcatccactcggacacatcaccgaggccggcggaagttaagactttcatatagagcacccatatttcccgttcctccgatgaaagaatgttttcgtttaatactgttgtatcgtgtaaattatattccatttcatcacttcctcatcattcactcctcttaccatattactcgattttcactcctgaaagaaagtgagcagaaaccgcatgcgggactttgtccgaaaaataacggtagtgtataatgagttggagattattgggggagaggatcgaactagaatatgattggagagaccattgctgattaaaaagaatgctttatcaatattaaaaatcgtttttcctattgctgttttgctatttgttatttatcaatcgaaaaaagaactgacaaatctgtcattcaaacgtacgctcatggtcatcaacggactggaacgaactgacttatttatgcttgtgttgatcggcttgctggctgttgcggccatgtcgctgtatgattacgtcctgaaatactcacttcgcctatcgatcacaaacggaaaagtattcagggtttcctggatcgccaattcatttaataatgtgctgggcttcggcggtttagccggcgtcgggttaagaatgatgttatataaggagcatacgaaagaccataaggcactcgtgaaaggaatcgcctggctcacatcatctatgctgctcggattatctgttttcagcattttcgtcgctgcgagaatgctgccagtggatgaagtgattcatgaaaagccttggctatgggcggtcgttatcggttttgcgctgatattgccgctgtctttggcggtgtccaaaataaaagaccgcaaagctggggacgaagagaatgcggacaaagtgaaaaatccgattttcgcatatattggagcttcagttgttgaatggctcatggccgggatcgtcatctattttgctttgttcgctatgggcattcatgcagatatcaggtatgtgttcggggtgttcgtcattgcggcgatcggaggaatgatcagcctcgtgccgggcggcttcggctcgtttgaccttttatttttgctgggaatggagcagcttggctatcatcaagaggccatcgttacttctattgtgttgtacaggctcgcctactcatttatcccatttatcttgggactgttctttgccgcaggcgacctgacggaaaatacaatgaagcggctcgaaacgaacccgcgcattgcaccggcaattgagacgacaaacgttctgcttgttgttcagcgtgcggtattagtgagaattttgcaaggctcgctttcccttattgtgttcgtagcaggtctgattgtcctggcctcagtttccttgccgattgaccggctgacggttataccgcacattccgcgcccggcgcttttgctgttcaacggcctgtccttaagctcagcgctcattctgctgattctgccgatcgagctttataaacggacaaaacgttcctatacgatggccattacagcgcttgtcggcggctttgtgttcagctttttaaaagggcttaacatcagcgcgatattcgtattgccgatgattatcgtattgcttgtgctattgaaaaaacaatttgtccgcgaacaggcatcctatacactgggacaattaatattcgctgtggcgctgtttactgtggcgctctttaactacaatctgatcgcgggctttatttgggaccggatgaagaaggtgctgcgtcacgaatatttcgtccacagcacctcgcatattacacatgcaaccatcatggcgatcattattgtgccgctgttcttcttgatatttacagtggtctatcataagagaacgaaaccgatcggagagaaagctgatcctgagcgtcttgctgcgtttctcaatgaaaaaggcggcaacgcgctgagccatctcggttttcttggagataagcggttttatttttccagcgatgggaatgcactgcttctgtttgggaaaatcgccagaaggctggtcgtgctcggcgatccgtctggccaaagagaatcattcccgctcgtgctggaagaatttctgaacgaagcgcatcagaagggattcagtgttttgttctatcaaattgaacgagaggacatggcgctgtatcacgattttggctacaacttctttaaattgggcgaggaagcatatgtagatttaaatacatttaccttgactgggaagaaaaaagccggccttcgggcaatcaataaccgctttgagcgggaggagtatactttccatgtggatcatcccccattttctgatgcgtttttggaggagctgaagcaaatctcagacgaatggctcggctcgaaaaaagagaagggattctcgctcggattttttgatccttcctatttacagaaagcgccgatcgcctatatgaaaaatgcagaaggagagatcgttgcattcgcaaatgtcatgccgatgtaccaggaaggagagatatcggttgatctgatgcgctatcgcggcgacgctccaaatggcattatggacgcattgttcatccgcatgtttttatgggcaaaggaagagggctgcacgtcttttaatatgggaatggcacccttggccaatgttggcactgcctttacatccttctggtccgaaaggtttgccgctgtcatttttaataatgtcagatacatgtacagcttcagcggcctaagagcctttaaagaaaaatacaaaccggagtggcgagggaaatacttggcgtatcggaaaaacagatctctttctgtcaccatgttcctcgttacacgtctgattggcaaaagcaaaaaagactccgtctaataagacggagtcttttttttatttcgtttttaagaagtaggtttcaatatcatcaagcagatagtttgcggctttaattccgcctgcggttgtccacacgacgtcatcgacttcatgtgcattacctgacttcacggcctttaggtttttccatagtgaactgcttgtccactgattggcccatttttcattttcctttgcattatcggctttataagtgaaataaaacagcacatcagcatccatatcaggaatagattctttactgtcggttgagaacgtaaattggtccttttgtttcttaaacagctccacttgtttttcagggcgtttgaagccaagctggtctaaaataatcccaggaaatgaatcggtataatagattcttgactcaccggataaaaagcgtacgacagaaacggttttgtttgtctggtcgcccagcttgttttttaaatcagaaacgcgtttatcaaaatcggcaatgacttccttgcttttgtccgccttattcaccgcgttggcgtatagagtcaggttatccttccagttcccggccaaagattcagcaaaaacagtcggcgcaatcgcatttaactgatcataaattttctcctggcgcactttgtttccaataatcaaatcaggctttaattctgcgatggcttccacattcggttccgtttcaagaccgacgtttttaacacctttcatgtcatctttcagatagtcataccacgggtcgcccttccatgactttacggctccgaccggcttaatgccaagcgctaagagcgcctctgttccttcattagttaaaacaacaatccgttttggattggcggggatgttgtctgatgtccccattgcatgtttgaccgttcttgttttgctgcttgacccctcgctgttgcttgaactttctgaactattacaggcagaaagtaccataaaggccattaaaaatacgaatagcatgctgatatgctttttcatctttttcctcccaatattgaaattcattatcatttagatcataataagcagtgttaagagtgtcaatccctaattgaggattattctcaaaaacaaacattacatagtaaataactaggagaatattagatcatgatctgcaaaaaggcatcttcaaaatggattgtgttagtatgtctgattttcattttactggcggctgtctgcgcaagcgtcgtgtatggctatacaggtacgtcatggagacaggtctatcaggcgtttacttccttcaacggaacaaatgagcatgtcatcatcaaggatgtcaggcttccgcgcgctttggttgcgacagtcgtcggcgcctcgcttgcagccgcgggcgctctcatgcaggcgctcacaaaaaatccgcttgcgtcaccggggattttcgggattaacgccggtgcaggtttttttattgttgccggatcgttttttctgcatattcagtcacctcaggcgctagtatggagctcgtttcttggggcagcatttaccgctgcgatcgtctatgcagcaggctcgcttggaagagaaggactgacgccaatcaaactgacgctggcgggagctgccatggcagccatgttttcttctctgacacaaggcttgctttctgtcaacgaactcgagcttgcccaggtgcttttttggctgactggctctgtgcagggccggagtctggatctgttgatgacgatgtttccatatgcagcggcagcgctggtaatctgcttctttctcggccaaaaaattaacctcctcgttatgggagaagatgtggcaaaaggactcggccaaaaaacgggcctgctgaaatttgtgatggcgctttgtgttgtcatgcttgcagggtccgctgtcgccattgccgggccgatttcttttatcggcatcattattccgcattttgcccgctttgtcgttggtaatgattatcgctgggttctgccattttccgctgttttgggtgccattttgcttgtttgcgcggatatcggtgcgcgatatatcattatgcctcaggaagttcctgtcggggtcatgaccgccatcatcggaatgcctgtgtttgtgtacatcgcaagaagggggcgaagctatgaaacttcgttttggcgttactgcggctgaaaagaaagcatggatcgtctttttgattttactgggttaacagctgcggtactcatcataagcgctggtctcggacaaaggtttattcctccctgggatgtagcaaaaacattctttggtgcaggttccaagctggatgaactgatgatcatgtcgttccgcatgccaagaattttgacggctttatgcgccggtgtctgcttggcagcggcaggcgcgatattgcaggggctcgtcagaaaccctctcgcatctccggatattatcggaataacaggaggagcggcggtagcggtcgtgcttttaatgatgttcttctcagaccgcagcagttcacttacgatcagtctgtcatggcttccagcagccgcatttatcggcgcatcggctgtcgggctcatcgtctatttactggcatacaaaaatggcgcctccacatttcggctggtgcttatcggaatcggattttcaatgtcggcgcaggcgatgactaccctgttgatgatcaaaggcccgatttaccgagcatcacaagccaatgtgtatatcactgggtcagtttatgggtcaaactggcagcatgtaaaaatagctattatcttatctgtcattctcttattcatttgttttgtcgcgctaaaaaatatgaatatacaggtgctgggtgaagatattgcggcgggtgcaggaagcgctgtgcagcgaaatcgttttttcttgctacttttgagtacggctcttactggttgtgcagtttcagttgccggcacaatcggttttgtcgggctgatggcgccccatattgcaagacggcttgtcggctcatcttatggcgcgctgctcccagcgtcggcacttattggagctctgctcgttttaacagctgatatcgtcggcagaaccttatttgctccggtggaagtgccggccggcgtctttacagcggctatcggcgcaccttattttatttatttgctctataaaacaagaaattcttaatcgttacacccattttcttaaaaaagaaaatgggtttttttgataatgactgaagattcgtaattatttttgctatactgacagagacattgataaagaaagggcggcagatgaatgaaagaagcagaggtattaaaatatgaagcatttacaagcagtcccggcaaaggaaaccccgcaggcgtcgttttgcagggagacgattatacggaagacgagatgcagatcatagctgagcgtgccgggtattcagaaacctcctttatccgaaaaagcgagtcggccgatcttgaactccgttactttacacctggacacgaaatgaatttgtgcggtcatgcgacagttgcttctctttacgcattatgtgagaaaagaatgctggagagcggtaaaacgtacagcatccaaacgaaagcgggtatcctgcctgtgaagatttctgaaaaagatggccgtattcatatcacgcttgaacaggcctctccgcaattcaaaccatttacaggcgatcggggaaaacttgcgaccgcactgggtatcaccgatgaagattttcatgaagaccttccgattgtgtttggcagcactggcatatggacagccatcgttccgcttaaatcattggaggcttccaaaaaaatggtgccagataacaaacaatttccggaagtgttaattgatctgccaaaagcttcagtccatccgtttacctttgaaaccgttcatcccgacagcgacctgcacggacgccacttttcatccccgtattcgggaacgattgaagaccccgtgaccggcacagcatccggcgtgatgggggcttatatgaaacattatggaaatgccgagcagcataaatttatcattgaacaagggcaggaaattggaaaagacggaaaagtggagatcgaaatgaacgaagccggcggccatgtgaaagtgaacatgacaggaacagccgtttactcagaaacccgtattcttaaattctaatacggatgatggtttacaaaaagatgcactttccgttattattatgaaatgataatcattttcaattgcataggaaggtgagacggtatgcctcaaaccgaacaaatacatcagcattcagtactgcgggacatcatacgcagcagaagatcgattcgaaagtttaaacaagagccagtaccttcagcagtcattcttgacatgcttgaaacggcaaaatatgcgccaaatcacagagtgacagagccatggagatttatttacgtttccagtgagacaggtaaagcgaacctcatcaatacatttgcagcgttctctaagaaatccaagccggatatgacagaggaaaagcttcaaaatttcaaaaacacacttgggcgcgttccgggatttctgctcgtcgtgtttcaggaagatgaaaacgaaagagcgcgggacgacgattttgcggcaacaagctcgttgattcaaaatctccagcttcttgcttgggaaaaaggaatcggcatggtttggaaaagcggaaaaatcctttatgacaaagaagtccatcaggcctttggtttgcaggataatgagcgtttcgccgccatcatacaaacaggttatcctgacgaggcgccggaagtgaaaaaacgcacaccgatccgcgaccggtttactgaaatgtaaaaagccccttgtctcaaacggagacaagggtttttcattaacgagatttctttttcgctctgttgtcggctgctttcgcacgctcttgcgcttcgcgatcatctgcatcagcaagctcggttgaatattcttcgtaaacgccgtcagtttccctttttaatgtatcgggaacttgtggaagcttttgtttgtttttatcacggtttttgtggatatgatttctgcccatatcaaattccccctaaaaagtgatatcaaacaaatatagtatttggttttaaggggttatgtattcctacttccgcttagcagctttttccgcttttttaaattcgcctgaataaagaacttcctgcatttttttcaggttggcgccttgctggtgcttctccctctttttttccataaaaaggacctccttcaaccatgttattcttaaggttgacgcttcctgctgtttttatacagtctttcggtccgctatcagctgtgagagtgcaaattcaagatccgaatatgtaaaacgaaatccagaggttatcgcttttttaggaagagcgcgctgtcctttcacaatcaaaagactcatttcacccaatgcttttgataaaaagaattccgggacggggagccaatgcgggcggtgcttcacccgtgcaatcgcttttccgaattgcttcatgtccacaggattgggcgcggtgacattcattgggcctgagatgccggcattttccaccgcatatcggatcatctgggccgcatcctcgacatgaatccatgacagccactgccttcccgttccaatcgttccgccggccagaaacttataggggagaaccataagcggtagagcacctttttctccaagcatcacgccaaatcttgcataaaccgtccggatgcccatcgcttcaatatgctgtccttccttttcccacaggtgtgcagtatggctgagaaaatcctcatctgacgttgcagaatcctctgtgaaagttttctcaaggcttgtcccgtaaatacccacggcactggcttggatcaatgtcttcggcttctccttctgtttctgaataagccgctgcacttcacgcgtcgcattgatacggctggagagaatgtgctgcttcgttttttctgtccagcggccaaaaatcgattttcccgcaaggtttatccagacatcaatatgaggaagttcctgctccggggcggctccttccgtcagccattggacatatgtcatatttttttgttcagtttcccttgcgtttcttgataaaatataaacatggtgtccctggcggataagaacgcctgtcagatgctggccgagaaaaccggttccgcccgtcattgcgatattcatgaacatctctcctcatcgttctaataaatatactttacctcattgtaataaaagaaaacgcgtttcaggcctgagaagggagattaagatgccgtttattacaaaaatatcaacgcaaaaaaagaatacggaacgcttcaatatttttctggatgataaatacgccttcagcgtggacgcggatgtgctcgtgaaatttgagctcaagaagggaaaagaactcgatgatcttgacatcattgagattcaatacggcgatgaagtgaagaaaggcttcaaccgtgcgcttgactttttatcctatcgaatgcggtcgacgaaagaggtcgaggaccacttaaagaaaaaagaaacctcgccccccgtcattgcggaagtcatccataggcttaacgattacaagtacttaaacgaccaggaatttgcctcagcctatgtcagcactcacaaaaaaacaaacggaaaaggccctgatgttttgttcagagagctaagagcgaagggaattgatgccgatacaattaaggaggcgctaagttccttttcctttgaagatcagacaagagaagcggtcaagcatgttgaaaagcttctcaaaaaagataaaaagctttcgacgaaagaattcaaacagcgcgcccagctgcagcttcagcgcaagggcttctcatttgatgttatcagcgcggcgatggatcagattgaatatgaaaatgatgaagacacagagaaagaagcgctgcgccttcacgcggaaaaagcgtttagaaaataccgctatgacggctcatatgaaagcgccatgaaggtcaaacaatttttattccgcaaaggattctcactcgatttaatcgagcaattactgcaggaagaggagtactgaaatggagaaacgatacagtcaaatgacacctcacgaactcaataccgaaatcgcattactttctgaaaaagcaagaaaagccgaacagcatggaatcataaacgaactggcagtgctcgaacggaaaattacgatggcaaaagcatatttgctgaacccggaagattactcaccgggagaaacatatcgtgtggaaaacactgaggacgagtttaccatcagttatttaaatggcgttttcgcatggggatacagaacctcttcccctcagcaagaggaagcgctgccaatctcagtattgcaagaaaaagaataaagcgtaacaggaggctgattatcagcctctttttgtttgcagcacatttacacgaattcttaaagaaaaaatcattgaattcacttgaaaaatcttttaagatgaaactcgttgttttttaaaatcaaaggaggcgatgacgttgagtatcaaaaacccatctgtaaaatttattatatttgttcttatgatttgtacattttcaatcggctatacagaatacgcggtgatgggtattttgacgtcgattgccaatgactttcatatacaggtttcatccgcagggcttcttgtcacggcttatgcggctagcgtttgtttgacaggaccgctcgtcaccatcatttccgtcaagcttccgagaaagcctgtgcttcttgggctgatggcggtttttatcctttccaacctgatgagcgcactggcgccgaattttgcggtattggccatttcaagaattttatctgcgtccattcacggcgctttcttcgcgattgccatggtattcgcaagtgaaatggttccgccggaaaagcgtgctgcagctgctgcttcaatgaacggcggactgacagtggctctaatgcttggtgttccattcggctcttatctcggagatgtcctgaattggagagcggtgttttccatcattacggctcttggtgtcatcggatttttaggccttatggctgccgtgccgaacagaaaaccaaaagtgatcccaatgcttatgaatgagtggggggtttttaaacacaaacaagtgctgttttccttcgcgattaccattttaggctattccggtgtctttatcgcctacacctttatcgaacccattttgaggcattcagccggattcagcacggttggcattacaggtgctctctttgcgtatggattgggaggcgttgccgggaatttctttgctggaaaggtaccgctgcctttgctgactcggacgatgatcggcgtaatgatcggtttaatcggtgttctggctgtatttccttacatcgccatttacccggctgcagccattgtggcaacgttcctattcggggcatgcgcattcggcacgccgcctcttctgcaaacaaaggtcatttcctcatctgagggcggcacaaccattgccgcagctgtcagcgtatcagcatttaaccttgccaatgcccttggtgcatggatcggcggaatgattttaaacggaacaggctcttattcctggctgtttgcaggaggtgcgcttatgaccgcatgcggacttgtgctttctaccttcgcacacttatcagaaaagaagagcgtctacgaatatcaagtcaataaagggtaaaaaacagctgcagtgtatgcagctgttcttctttaccgtttgcctgaggctctcattctttcttgaggatgctgattgatagatccgtcagcacgctttgaagcatagtcgtcctttgctctcggttcaccctgaaatttgttttcgttttcgtaaggaaatcctttttctttatttcggaccatgtcatatccccctaggttcgagatcaaaaagttgcgtcttttcagatgaagacgtaaggttagtatatggagaacaccacgtaataaagcgttatttttttcctgaagaaaggagactgcacacatgaatatgtacattgagaaactgactaatctgcttctggaaaagaacgagatgatcagctatatacaggcaaaaacgtgggtggaattgttatggagcgatttcgaagcaacctacgcaaaagccggacacgcctatcaaggtgaaaaaatgactgaaaaaatcgtcacacaatggattgaaaactatggcggccagctccacctttttcaaagctcccgtaacgacgtgaatgattacttaaatcaaagcagaggccttttgcattaaaaacctgccgttaacgaccggcaggttttttcattttcttaaaattaccttaacaggaagaaatcataaacaaaacatgtttcaccagcctgtcaatcagggaataccacttatatcttgtcaaaatgcgaggaggagctttatatgaaaaagaaacaagtaatgctcgctttaacagctgccgcaggactgggtttgacagcacttcattccgctcccgcagcaaaagctgcgccccttcacgacatatctgtcagcatgccatcatccgatacttacatcataaaagcaggaaaactgaatgtccggactgagccaaatcatgaaggtgatattctcggcactgtatcatcagaacaaaaggtaaaagtcgataggttcgtaaatgccgattgggctcaaattcatttcaaaggaaagaaagcatatatttcaactcactttttaatgaaaaccgcaagccaagcgaaaacaacgaaacagacagccttctatgcaccgacgcccgaaaatggaaaagctaaacagctctcatctggaacagaggtgacaatacttgggtggggattcagtgaaaacggcggatttgacttcacttgggggttcgtggattatggcggagttaaaggctatattcacacaaaggatttacaaatgcgataaaaaggcaggccgaggcttgtctttttgcctatgcatgaaacatttcttctttctgcacgtaacaatgagaaaggagatgatgatatgacgggtttagtcggcggagggcttatgatcattgcgggcatactgatcaaactgtttcctcccaaatcgatcaacagtgtgtacggatacagaacgagacgctcaatgtcagatcaaagattatggaatgaagcgaaccgttacagtgcatcattaatgatcctgtcaggcttggtgattgcgggaatgggtttgctgctgggatcaaacttgtttattcttcagcttatcctgctgattgccgccagtgtcataacatttatgctaacggagaaaaggctgaaaatcatgacgcacagtcaaggaggagatagaagtggacggagttaaatgccagtttgtcaatacgaacggaatcacgctccacgttgcagccgcaggaccggaagacggcccgttaattgtcctgctccatggatttcctgagttttggtacggctggaaaaatcaaatcaaaccgcttgttgatgcgggttaccgggtcattgctcctgatcagcggggctacaatctcagtgacaaaccggaaggaattgattcgtatcggattgatacattaagagatgatatcatcgggcttattacgcaattcactgatgaaaaagcaattgtcatcgggcatgactggggaggggctgttgcatggcatttggcttccacacgcccggaatatcttgaaaaactgatcgcgatcaatattccgcacccgcacgtcatgaaaaccgtaacgccgctttatccgccgcaatggctgaaaagctcgtatatcgcatacttccagctccccgatataccggaggcatcactaaaggaaaatgattatgaaacattagacaaagcgattggattatccgaccgtcccgcgctttttacatccgaggatgtcagcaggtacaaagaagcgtggaaacagccgggcgcactgacagctatgctgaactggtacagagccctcagaaaaggaagcttggcagagaaaccctcttacgaaacagtaccttaccgaatgatctggggaatggaagaccgctttttgagcaggaagcttgcgaaagagacggaaaggcattgcccgaatggacatctcatctttgttgatgaagcttcccattggattaaccacgaaaagccagccatcgtcaatcagctgattttggaatatcttaagaaccaataagctaaaatttctctccatccgtctgtcataatggcagactttttctgtgcgtttttttcatagtctgttttaaacatgacaaaataacattaaaaatcatgaatgtcaccataaaattgtaacaaaaaacaggtttaaacgactttaaaaaaaggaatagccttactgaagatttgtgtaaaactcccctaaggcaatacttaaaaagaataataaaaagaaggtgccttaatgaagcaaggattaatctcgattattatcccgtcttacaatgaagggtataatgtcaaactcattcatgaatctttaaaaaaggaatttaaaaacatttattatgactatgaaatattcttcataaacgacggaagtgttgatgacacgcttcagcagatcaaagacttggcagcgacgtgcagccgggtaaaatatatatctttttctcgaaactttggaaaagaagccgcaattttggcgggctttgagcatgttcagggcgaggcggttattgtaatggatgccgatctgcagcatccgacatatttgctgaaggaatttatcaaaggctacgaagaagggtatgaccaagtcattgcccaaaggaacagaaaaggggacagctttgtccgctcactcttatcatctatgtattacaagttcattaataaagcggtggaagtcgatttgcgtgacggtgtcggtgacttcagattgttaagccgccaagctgtgaatgcacttttgaagctgagcgaaggaaaccgcttttcaaaaggccttttttgctggattggctttgatcagaaaattgtattttatgaaaatgtcgaacgaaaaaacggcacctccaaatggtcgttcagcagtctgtttaactacggaatggacggcgtcgtttcatttaatcataagccgctgagattatgtttttatacaggcattttcatcctgctgctttccatcatttatatcattgccacattcgttaaaattctgactaacggtatttctgtgcctgggtatttcaccattatctcagcagtgttatttctcggcggagtacagctgttaagccttggaattataggtgaatatatcggccgaatctattatgaaacaaaaaaacgcccgcattatttgatcaaagaggcgaatatcccgaacaaagacctgcctgaaacgaacgaattaaaaagcatgcggcgtctgacaaaaatgcactgaaaataccaagcgccattggcagtgctttttttgcgtgtctattatcttaaaagcaagactggagaatttatatgaaaagaaaacatatcatgatctatgcggccagtttgctggtgtccgttctggcacacgctttttttgtgaaagaatgggcggaaggcaggtatatgacaggtccgggtgacgggcttgcgcaaatgatcgtatttaaaaaattattatttgaccaatatacacacgggaattttttctacaattattcattcggacttggcggcggcacattcagtcagctcggctattatttttccgcgtcttttctttttcttgctgtgtccgccgctgtttggctgcttcaagccgtccagctgatcggagaagcggatacgcttttttgggcagagtcagctgttttcatcagtatttttaaattgagcttgatcatctttacgtccgcttctgtttttcattatcttcttaagcacagggcggcatcgttcacgggagccgtgttatacggcgtctcaattatttatttccgtcacgaagcgtattgggaatttttcaccgatacaatggtttggcttccgctgcttgtgcttggtgcagaaaaaattattagagagcggcgtccggcgtggtttatcgttgcgtgttcgctgacgttaatcaacaatttttactttgcatacataaaccttatattcatcggaatctatgtgctgttcagatggctgatccgtttggaaccacatgaagagaaaagatggattcaaatcagattatttctcgtttcaggcttcatttcttttggcatcagtgcggcggcgtttgtgccggtagtatacggttttttaaacaacctgcgccctccatacagccagaaaatagagtggctcaatttcgatgataatatcttattttcgagccggatcatcattgtgccggccgcttttctgctgtttttgtttattatttctttttacaaaaaccgtgtgtttcgtctctttgccgggttgagcctgctgtttattctgtttcatttcagtccgtatgcggcaagcgtctttaacggtttttccgccccgcaaaaccggtttgaatatgttctggcctttaccattgcgggagcagctgcggctggtttgtcacagctgtctgaattgaaacggaaagaactgctcccggccgcagctgtcgtcctgcttctttacttgtatcatattcaaaggtataagctcgatatatggaagcctgcgaatgaaagtattctattgctcttactcatgacaatcgcagccttgtttgctgcagcttttgcgaaaaaacgggcaaaaatggctgtgtacggtataatcattctttcttcgctgtttgtcgccaactcctatcaaaaatacgcgctctcagaaggcggcgatttggatagtgtgacaaaagaatatcttacaagtgaggaatacagagggcgggaatcatctgagctcatcagacgtttacagaaggaagacgatgatccgctcatgagaatcgactggatgaacggggtccgcaataatacgccaatcatttacggatttaatggcttcagcgcgtattccagcattttaaacaaagatctgctggccttctattggaatgatttaagcatcgatatgggcagggaaagcgtcagccgttacgcgtcattgggagacagggcgaatttatacagcctgctttacggcaaatattatatgaccgaaaaaacaaacgaagccagcgtcccgtacggattcaaaaagcatttagaaacagagcattatgcagtttatgagaatcagtacatgcttccattcgtcaaaacagcggatgccatatacagcgaaagtgagctggaccgattgcccgctcttgcgaaagaacaggcgatgctgaaaggaattatattaaaagatccatcaggaaaaacggagcagacaccaaaaccgtccaatttgatcaccaagtcggacatcaccgcaaaacaagcccagtatcaaaacgggctgctaaccgtaactggagaaaacggaggagagctgatcatcaccccgaaacagccatcatccgctgcgggagactactatgtcagcttttatttgaaaagcaaagcaaaagacaaaggatttacgttaaaggtaaatgattatgtcacaacaaggaaatcgaacaaatcgatctataaaaccggagtaaataatataacggtaagagtgcctaaatcaggccatatctcaatcaatcttccgaaaggaacctatgagctgagaaacatagcgctctatgaagaaaattaccaaacgctgaaaaacgctgtaatgcaaaataaaacagagaaagcagacaaactgaattggaacaaaaatcgactgacctttgcctatcatctgtcaaaagaccagtacatcatgcttccgatcccatatgaaaaaggctgggagctgaagatcaacggaaaaacacagaagatcgaaaaagcggattatgcttttataggcttcaaggcgcaaaagggagacaatcacattgagctgacttactatccgccatacttcaaaatatcggcggtcatatctctcgtcagtctgctgtttgctgttttctatataagacgtaaaaagcccggctctatatagagccgagctttaattttttctgaagtttttcttcgctgaatatccatcccgtataggacgaacgaatcgtgagatcatggccgatgtgaacaattgcgacaaacggataatggcctttgctccgataacgcaggtcgataaatctcacctcataatgatctttaaacgtatccacttcccaccggtataccggagaaaaggacagaaacgccgcaatgttatcatcctgctttgccgcatgcattacatcggtttcaggaacaggcacccgattaaatgtatccagaatcacgacatgtccttccatgcttcttcctacatagaaagcatgtgctgtcgtcactgcgattcgccattgcctgaatttcatcgttggagaaataataatgctttcgatctcatcatgaatcatctcatgaagcttccgtttaattctcagctgcatgatcaggcgcaccaagtagtagcctaccaatatgatatataagctgagaaacgtgatgccgggactcccgcctgcataccaaatcgcgatagctgctagatggctgataaaaataaacggatcaaacgtattaatcagcccgagcgcaacccattttttcgaaaatggacgaatggcttgtgttccataggcgttgaatatatcaacaaagacatgcagaacgactgccagcagtgtccacagccacaggtgcagaaaatcggcctgaggataaaataaatacagaatcgccgggatgatgacagaccaaaacaaaacggcgggaattgaatgggtaaatcctctgtgattccttatataaacagcattgtttttaagctttaacacagtatcaatatccggagcctgagagcccgcaagcgttgcgatcataacagcgtgagccattgccggatctgatccgacaacaggatcaagcgtcgcaataccgcccagtgcgatgcccataacgacatgtgtgcccgtatccataggtgacctccttgcaggatgatcctgcacattcactttgtaagaaattccccattttcatatacccaatttttaaactgattcaatcgttctcatatgtttccgctttttctttattactatttaatgtaacatattatcgtactgtgcccttagtgtacaacaaaaaacagtctaaagaaaagcggggcgcgaaagactggggagaaacacatatgaacgtacttgaagacaaattaaaacaaaaagacatacagcaatttcgcgatgatttaatctcatggtttgaacgagagcagcgcgttctgccgtggagagaggaccaagatccatataaggtgtgggtatctgaagtgatgctgcagcaaacgagagtagagacagtgattccttactttctccggtttgtggaacaattcccgacagtggaagcgctcgctgatgctgatgaagaaaaggtgctgaaagcatgggaagggctcggctattattcgcgagtcagaaacctgcaaagcgcggtaaaagaagtgaaacaggaatacggcggcattgtccctccagacgagaaagattttggcgggttaaaaggcgtcggcccttatacaaagggagcggtgctcagcattgcctacaataaacccattcccgcggttgatggaaatgtgatgcgtgtcatgtccagaattctttctatttgggatgatattgccaaaccaaaaacaagaacgatctttgaagacgccatacgagcttttatttccaaagaaaaaccatctgaatttaatcagggcttgatggagcttggagccttgatctgtacgccaaaatcaccctcatgcctgctatgcccggttcagcagcattgctcagcatttgaagaaggcactgaacgggagcttccggtaaaaagcaaaaagaaaaagcccgggatcaaaaccatggccgcgatcgtactgactgatgaagacggacaagtgtatatccacaaacggccgtctaaaggtttgctcgccaacctgtgggaattcccgaatcttgaaacacaaaaagggatcaaaactgagcgtgaacagctcattgctttcttagaaaacgaatatggcatacaagctgatatcagtgatctgcaaggtgtagtcgagcatgttttcacccacctggtatggaatatttcagtgtttttcggtaaagtaaaacaagtgtcggataccagcgagctgaaaaaagtatcgaaagaagagctcgaacaatttgctttcccggtgtcacatcaaaaaatctggaagatggcagtagaagcagccgccatctcggctgctccgtaaaccattcttaatcgtaagagacgcgcgtgccgtggctgtagtccgcttcattgcgcttcattccgccgcgcgcttcaatttcttgcgttaattcccggtattttgattggccttcttcgttcaaataaggcataatttgctgaaaggcatgatgaaaataagcgagttcactgttcttccaatcttttttggaaaccatgttcaattcgctcatatcacgtccgacatacataacagaagaccccctttaaagttcttgccattattgtttgtggaaataaaagaactatacgctacaaggagatgaggaaaaatggaacaaaataaatgtgcactcgtaacaggaagcagccgcggtgtcggaaaagcggccgcgatcagacttgctgagaacggctataacatcgtcattaactatgcacgcagcaaaaaagcagcattagaaacagcggaagaaatcgaaaagcttggcgttaaagtgcttgtcgtaaaagcaaacgtaggacagcctgcaaaaatcaaagaaatgtttcagcaaattgatgaaacgttcggcagacttgatgtttttgtcaataatgccgcttcaggagtactaagacctgtcatggaattagaagaaacacactgggactggacgatgaacattaatgcgaaagcattgcttttctgcgctcaggaagctgccaagctaatggagaagaacggtggcgggcatattgtcagcattagttcattaggctctatccgctatcttgaaaactacaccacggtcggtgtatcaaaagcagcgttagaggctttaacccgttatcttgccgttgagctttcaccaaaacaaattatcgtcaatgctgtttcaggcggagcgatcgacacagatgcgctgaagcacttcccgaatagagaagatctgcttgaggatgcgcgccaaaacacgccggcgggacgcatggtcgaaattaaagacatggttgatactgtggagtttctagtgtcttccaaggctgacatgatccgcggacagacaattatcgttgacggcggacgctcactgctcgtttaaaaatttttaaaaaagaggaatagctatacgatcacctgcacattctaatgaccgtggaggtgataacaatggctaactcaaataacttcagcaaaacaaacgctcaacaagttagaaaacaaaaccaacaatcagctgctggtcaaggtcaatttggcactgaatttgctagcgaaacaaacgctcagcaagtcagaaaacaaaaccagcaatcagctggacaacaaggtcaattcggcactgaattcgctagtgaaactgacgcacagcaggtaagacagcaaaaccaatctgctgaacaaaacaaacaacaaaacagctaatcactgaaacagaaaaaagcacttcatcttcgggtggaagtgcttttttctgtttgaaaaacgacaaaacttgtggaaggtctacagaatgagtcaaagggtttgctttatggagatcgaaatgattaaaggaggaaatgtttatactttcatcaggctgaaggaggaaccgatgaccgaatttgaaaagctggtaagtgaacagatgaaaacgatggataagcttctcgatctccaatcagagctcgaccgctgcaaacaaattgaggcggaactccggcatttggaaagggatgcaaggctgcgtgggattcaggctgaaattgcggtaaaacggaaacaccttgccgatatacaggatatgtttcaaaagcagacagagcaggtcattcgttcatatcgcagctcagaaaagccgtcttcctttgtgtagtgcaggaatgtgccattccccggccggaatggctcttttattttcatttttcaatttgtaacgttataataggtaaaagacgttgtcggtaagcaaatttggacatactaactgtagggctttatagaaagtaggggagaaatatgggctatcccaaggaaggagaaaccattcaaattcacagctataagcacaacgggctgattcatagaatttggaatgagacaacaatcttaaaaagtacagaaatgtgtgtcatcggagccaatgaccggacgatggtaaccgaatcagacggccggacatggataaccagagagcccgcaatctgttattttcacgcaagacaatggtttaatgtcatcgggatgctgagggaagacggggttcattattattgcaacatcagttctccgtttgcctatgatggcgaagcaattaaatatattgattatgacttagatgttaaggtttttcctgacatgacctacaatattctcgatgaagacgaatatgatgatcatcggaaagccatgaattatccaaaagaaatcgacagtattttaagagactacttaaatacgctgctccattggattcaccagcgtcagggaccgtttgcgcccgagtttgtcgatatgtggtatgaacggtatttgcgctatacaaaataatggttacgtaaaaacctgttgcggggtacaacaggtttttcacatgggctcacacacatcatgataaagagagagggggaatcaacgtgggggttatgaaacgctacatgcaattcgtcaaaccttataagaagcaaattttcgttacagtattaatcgggatcgtaaaattctccattccgcttgctctcccattgcttctgaagtacgtagttgacgacattattcaaggaggcggcacggccagtgacaaaaccacgtcattgttcacgattatggcgatcatgttcgccttatttttaattttgcgcccgcctgttgaatattaccggcaatattttgcccagtggactgccagcaaggtgctttatgatataagagctaagctgtttgaccatatacaaaaactgagccttcgtttttacgcgaatacaagaacaggggaagtcatttcccgagtgattaatgatgtagaacaaacaaaggatttcgtcatcacagggctgatgaatatatggctcgatatgctgacgattttgattgtaatctctatcatgctcacactggacgttaaattaacgctgatttctatcgtattattcccattatacggaatatcagtgaagtatttttacggccgtttacgaaagctgacaagggagcgctcacaggctcttgctcaagtgcaggggcatttgcacgaacgcattcaaggcatgcctgtcatcagaagctttgcgatagaagatcatgaacaggctcaatttaatgagaaaaacggtcatttcttagataaagccatccgccacacgaattggaacgccaaaacctttgcggtcgttaataccattacagatttggcgccgctcatcgtcatagcgtgcgccgggtattttgtcattaatggaccgctgacagtcggaacaatggtcgcgtttgtcggatatattgacagaatgtacaaccctgttagaaggctgatcaattcctctacaactttgacacagtcaatcgcatcaatggacagggtgtttgaatttattgacgagccctatgaactcactgacaaaccaaatgcgataaaggccgatcagattcgcggaggagtggagtttcaaaacgtttcgtttcaatatgagaaggacaaagaaaatattcttcatgatgtatccttaaaagtaaatagaggagaaactgtagctctcgtcggcatgagcggaggaggaaaatcaacgctcgtcagcctgatcccaagattttatgatgtaacaagcggcagactgctgattgatgggacggatattcgcgattatgaagcaagaagccttcgcaaccaggttggtatggtgcttcaggatacctttttatttagtgaaacgattcgggaaaatatcgcgatcggcaagcctgatgccacacttgaagagataatcgaagccgccaaagctgcaaatgcccatgaatttatcatgagttttccagaaggatatgagacccgggtgggagaacgaggcgttaagctttcaggcggacaaaagcagcggatctcaattgcgcgggtattcctgaaaaatccgccgctcctcattttagatgaagctacatcagctctggatttggaaagtgagcattacattcaagaagcgatggacaaactggcgaaggatagaacaacttttgttgtcgcccaccgtttatcgacaatcacccatgcggataagattgttgtcatggaaaacggcacaatcattgaaatcggaacccatgatgaactcatggactatgagagccagtacaagcatttatttaccattcaaaatttgaactaaaacatcaatcttatatccttttaacgaaggatataagatttttttgtgtataaaaaaacccggctgtttaaccgggttactcttctgtttctatttcgcagtctttcggatgatacgtttgaaaacttgtgataagtgtttctaaatgttcaagctgctcgcgatattccacggcgcttgccataatattgagcatgttgtaatcaataagctcctcatccgtattctgctgattttttaaaaatgactttgttaaaagctgcttataccggatgccttcttcaaccgcgtcatcatgcggcttgatttttccgacaaacctcatcaaaatccgttcgtgccagtaaagcaggtaatcaagttcttcagtcaatgtttcctgaaactcttccggcatatgatagatctcgttttccagacgatgcagcttcttcaatgtatcaagcgcccgatttgcagtaataatggcctgtctgaacaggacaagctttcttgatttcacataagtcgttttcttaaagtaacttctttcttctttatatagaagatatgtctgatcaagcttgatcattttttctttcagtttttcaatatcctctttcaaaatcgaatgctctgtcgactgccgcatggacaatctgatccacttcataatttcttcggtgttttcgacggtattatgaatcagctttgtttcgtacttaggaggcaaaaacacaaggttgacgataaaggaagaaagcacccctaagatgactgtgcttgttctgatcagcgcgaacattaaaaagtcgtcaccggcagattctaatatcgcaatgactgttacaagagcaattgaaattgtatgttcaattttaagtttcagcatgattgtaatgacaataactgctgttaacccgatcataatcgggctgggtccgaaaataaggccgaacactgtggcaatcacagctccgatgatatttgcttgaacctggtcaataataatgagaaaagagcggtaaatcgacggctggatcgcaaatatcgctgcaattccagcgaaaatcggcgcgggaagcccgatccacgaagccaaataaagggcaagtgtaatcgcaatcccggttttgaaaatgcgggcaccaagtttcattggtttgtgcgtgcattcctttctatagtaaattgtgtgacatagcaaatgggctaatccttaaaattcccggttagtttatttgctaaacaattaagtaatatacagggatcgatacaaatattcaagctatttttctagaaaaagaccaaaatcttacacgttgtttgattccataaaaaaaacaggagctcaaagctcctgttcaaggtatctgattctagtttttaagatgtttaaaagcatcctcgaccgctgcaagcgtgtctttaatatcctgctctgtatgtgctgtggtaataaaccaagcttcatacttagaaggtgctaaattaattccgcgttccagcatcagcttgaaaaacgtagcgaatgtttctccgtcactccgttcagcctgctcgtaattttcgactttctcatcagagaagtataccgtgagcgcaccttttaaccggttgaccgtaatggtgatgccgtgtgtttctgcgtgcttcaaaataccttcctcaagcatagcgccaaggtgatcaagcttttcatacacgcctttttctttgagcacttccagacaagcgatgcctgataggatggaagcggggttccctgccattgttcctgcctgataagcaggtcctagcggagctacctgctccatgatttcttgtttgccgccataggcgccaatcggaagtccgccgccgataattttcccgagtgctgttaaatctggtttcacctgtaagagatcctgcgcgccgccatacataaagcggaaagccgtaatgacttcatcgtaaataacgagagcgcctgcattatgtgtcaattcatttactttttctaagaagccctctttcggctccacgataccgaagttgccgacaatcggttcaacgagaaccgccgcgatttcactgccccatttatcaagagccgctttatagctatcgatatcattaaatggtactgtgatcacttcgtttgcaatgcttttcggtacaccggctgagtctggtgtgccaagagtagacgggccggagcctgcggcgacaagcacaaggtccgaatgcccgtgataacagcccgcaaatttaatgatttttgtccggcttgtatatgcgcgagccacgcggatggtcgtcataacggcttctgtacccgaattgacgaatcttactttgtccatagcgggaatggcttctttgagcatttttgcaaatgtaacctcgtgtttcgttggtgttccatacaatacaccgttctctgccgcttttttaatcgcttctgtaatatgcgggtgggcatgtcctgtaataatcggaccatacgccgctaaataatcgatgtatttgttgccgtccacatcccaaaaataagcgccgcttgctttctccattgcaacaggagaaccgccgccgactgctttatatgatctagacgggctgtttacaccgccgacaatgtgctgtaatgcctcattgtgaagttcaattgattttgtatgcaagaataaaaacctcctatatctccatgcgtcctttctattgtagcatgcttccgaacaagaacaatggcttcgggcttcagattcagctgagatggttgtaatctggacaagaattggatacgcttaataaaaaacatccggaggtaacgtaatgactatagaaatcggacataaagcgcctgatcttgagttaaaaggtgatcatggggaaacagtaaaattatcggattataaaggaaagtacatcgtgctttatttttatccaaaggacatgacaccggggtgtacaactgaagcatgcgattttcgggacagtcacgaaagcttcgctgaactggatgccgtcattatcggcgtcagcccggacagccaggaaaaacacggaaaatttaaagagaagcataaccttccatttctgcttcttgttgatgacgagcataagctggcggaagcatttgatgtgtggaagctgaagaaaaatttcggaaaagagtatatgggaatcgagcgttccacttttttaattgataaagaaggccggctcattaaagaatggagaaaagtaaaagtaaaggaccatgtagccgaagcgcttcaaaccctcaaagatatgtcggaaaagtaaatctctatgagcctatgcttacttttaccctgatatcaattgacaaattatcgtagaaagagttacactaattataaacattacaatgtaagaattttttttagaagagaggtgcatgacggatggctgcacatgaactaaaagaagccttagaaacgttgaaggaaaccggagttcgcattactcctcaacgtcatgcgattctggaatatctcgttaactctatggctcatccaacagcggacgatatatataaagctctggaagggaaatttcctaacatgagcgtagcgacggtatataacaatttgcgtgtgttccgggaatcaggtttggtaaaagagctcacatacggtgatgcttccagcagattcgattttgtcacatccgatcactatcacgcgatttgcgaaaactgcggtaaaattgtggacttccactacccgggccttgatgaagtggagcagctcgctgcccacgtcacgggcttcaaggtaagccaccaccgtttagaaatttacggcgtctgccaagagtgttcgaaaaaagaaaatcattaaaaataagctgaccgcacgaaacggtcagcttattttatttcgacattttctttttattataagactcatcaaattcttttccttctaatcccttatctaaagtcagcggctctcggcaatgcatgcacatatcgactcttcctaaaacctttgtctctttatcacagcctggacaaatgacgcgaaccgctttagtcgaaagcattccgatccaaaagtaaactaccgtgctgagaccgatggataaaagcccaagtatcataaacaaactagaaagcaaaactgactctttgaaaaagatcccgatgtacataatgataaacccaacgaaaaccaaacttaacgcaaatgttctgattttattaattttgctggagtatttcgccatgtccatccccctctgttttaactatagcacaaacccgatgggattttcttcatgttttcggttgaactggaatttacatatggagagttactgtgaaattgtttataatagttcaatgtgtttagaaaaaaggaatttcgttttaaccatagaattgaatcaaatagagaataaaaaaatttgaacaattgcattggaggaatagtgatggaaaatcttctccgtccaatttaccaagaaagagcaagtcaccccaatacattggctgtcattatgattgagagaagaaacaaaacatcttccttaacagataactttgatgcagctttgctggtgattgtaaaggatgctgatgagccagtttttataaagcattatgaatttgatcatcaaacagcttctttgcatgtggtaacagattctcagattcaagaatggattttgcttggaacaaatagaagaatcatagattggattgtaaatggcagagtcttgtttgaccgtaatgaatacgtagttgaactgattgacaggctgaatacatttccgtttgccgaacgtaaactgaagatcggactcgaatacggcaaattaatcagaaggtatgttgaagggaaagctttttttgaagccaatcaatttttagatgcctacaatgccgttgttcatgcgctgcatcatttagcacgtattgaagtaatcgacagaggattccatcccgaaaccacggtgtggagccaagtgcgccagatggagccccaagtgtacaaattatattccgagctgattgaaagtcatgagagcctggaaaaaagacttgaattattattcttagcaaatgattttctcatccattccaaagccgagatcggttcggcgcatcttttcgaagtaatgaaagaaaaagacatttggcaattcggtgagcttcttcaacatcatgacctaaagcactttacccaagatcttggcgttatgcttgattacttgacagaaaagggacttatcaacgtctgccagatagaaacgaaaggacaggctgtctatcaccgaggatattcttttaaaaaagatgttgactctgattcttgaccgtgttatattattaaacgtcgctgatgcgcttctgagaaaacaagctcacagcggcgggaaaataaatcaaaaaaacatttgacaaaagaaagtcaaaatgttatattaataaagtcgcttcaacaagaagtgaaaatgatctttgaaaactaaacaagacaaaacgtacctgttaattcagtttttaaaaatcgcacagcgatgtgcgtagtcagtcaaactagggtctgcacgacgcaggtcacacaggtgtcgccgcagaaagcggtgaacttaacctgtgatccatttatcggagagtttgatcctggctcaggacgaacgctggcggcgtgcctaatacatgcaagtcgagcggacagatgggagcttgctccctgatgttagcggcggacgggtgagtaacacgtgggtaacctgcctgtaagactgggataactccgggaaaccggggctaataccggatggttgtttgaaccgcatggttcaaacataaaaggtggcttcggctaccacttacagatggacccgcggcgcattagctagttggtgaggtaacggctcaccaaggcaacgatgcgtagccgacctgagagggtgatcggccacactgggactgagacacggcccagactcctacgggaggcagcagtagggaatcttccgcaatggacgaaagtctgacggagcaacgccgcgtgagtgatgaaggttttcggatcgtaaagctctgttgttagggaagaacaagtaccgttcgaatagggcggtaccttgacggtacctaaccagaaagccacggctaactacgtgccagcagccgcggtaatacgtaggtggcaagcgttgtccggaattattgggcgtaaagggctcgcaggcggtttcttaagtctgatgtgaaagcccccggctcaaccggggagggtcattggaaactggggaacttgagtgcagaagaggagagtggaattccacgtgtagcggtgaaatgcgtagagatgtggaggaacaccagtggcgaaggcgactctctggtctgtaactgacgctgaggagcgaaagcgtggggagcgaacaggattagataccctggtagtccacgccgtaaacgatgagtgctaagtgttagggggtttccgccccttagtgctgcagctaacgcattaagcactccgcctggggagtacggtcgcaagactgaaactcaaaggaattgacgggggcccgcacaagcggtggagcatgtggtttaattcgaagcaacgcgaagaaccttaccaggtcttgacatcctctgacaatcctagagataggacgtccccttcgggggcagagtgacaggtggtgcatggttgtcgtcagctcgtgtcgtgagatgttgggttaagtcccgcaacgagcgcaacccttgatcttagttgccagcattcagttgggcactctaaggtgactgccggtgacaaaccggaggaaggtggggatgacgtcaaatcatcatgccccttatgacctgggctacacacgtgctacaatggacagaacaaagggcagcgaaaccgcgaggttaagccaatcccacaaatctgttctcagttcggatcgcagtctgcaactcgactgcgtgaagctggaatcgctagtaatcgcggatcagcatgccgcggtgaatacgttcccgggccttgtacacaccgcccgtcacaccacgagagtttgtaacacccgaagtcggtgaggtaaccttttaggagccagccgccgaaggtgggacagatgattggggtgaagtcgtaacaaggtagccgtatcggaaggtgcggctggatcacctcctttctaaggatattatacggaatataagaccttgggtcttataaacagaacgttccctgtcttgtttagttttgaaggatcattccttcgaaatgtgttctttgaaaactagataacagtagacatcacattcaattagtaacacaagatatcacatagtgattctttttaacggttaagttagaaagggcgcacggtggatgccttggcactaggagccgatgaaggacgggacgaacaccgatatgcttcggggagctgtaagcaagctttgatccggagatttccgaatggggaaacccaccactcgtaatggagtggtatccatatctgaattcataggatatgagaaggcagacccggggaactgaaacatctaagtacccggaggaagagaaagcaaatgcgattccctgagtagcggcgagcgaaacgggattagcccaaaccaagaggcttgcctcttggggttgtaggacactctatacggagttacaaaagaacgaggtagatgaagaggtctggaaaggcccgccataggaggtaacagccctgtagtcaaaacttcgttctctcctgagtggatcctgagtacggcggaacacgtgaaattccgtcggaatccgggaggaccatctcccaaggctaaatactccctagtgaccgatagtgaaccagtaccgtgagggaaaggtgaaaagcaccccggaaggggagtgaaagagatcctgaaaccgtgtgcctacaagtagtcagagcccgttaacgggtgatggcgtgccttttgtagaatgaaccggcgagttacgatcccgtgcaaggttaagcagaagatgcggagccgcagcgaaagcgagtctgaatagggcgcatgagtacgtggtcgtagacccgaaaccaggtgatctacccatgtccagggtgaagttcaggtaacactgaatggaggcccgaacccacgcacgttgaaaagtgcggggatgaggtgtgggtaggggtgaaatgccaatcgaacctggagatagctggttctctccgaaatagctttagggctagcctcaaggtaagagtcttggaggtagagcactgattggactaggggcccctaccgggttaccgaattcagtcaaactccgaatgccaatgacttatccttgggagtcagactgcgagtgataagatccgtagtcgaaagggaaacagcccagaccgccagctaaggtcccaaagtatacgttaagtggaaaaggatgtggagttgcttagacaaccaggatgttggcttagaagcagccaccatttaaagagtgcgtaatagctcactggtcgagtgactctgcgccgaaaatgtaccggggctaaacgtatcaccgaagctgcggactgttcttcgaacagtggtaggagagcgttctaagggctgtgaagccagaccggaaggactggtggagcgcttagaagtgagaatgccggtatgagtagcgaaagaggggtgagaatcccctccaccgaatgcctaaggtttcctgaggaaggctcgtccgctcagggttagtcgggacctaagccgaggccgaaaggcgtaggcgatggacaacaggttgatattcctgtaccacctcctcaccatttgagcaatgggggacgcaggaggatagggtaagcgcggtattggatatccgcgtccaagcagttaggctgggaaataggcaaatccgtttcccataaggctgagctgtgatggcgagcgaaatatagtagcgaagttcctgattccacactgccaagaaaagcctctagcgaggtgagaggtgcccgtaccgcaaaccgacacaggtaggcgaggagagaatcctaaggtgatcgagagaactctcgttaaggaactcggcaaaatgaccccgtaacttcgggagaaggggtgctctgttagggtgcaagcccgagagagccgcagtgaataggcccaggcgactgtttagcaaaaacacaggtctctgcgaagccgtaaggcgaagtataggggctgacgcctgcccggtgctggaaggttaagaggagcgcttagcgtaagcgaaggtgcgaattgaagccccagtaaacggcggccgtaactataacggtcctaaggtagcgaaattccttgtcgggtaagttccgacccgcacgaaaggcgcaacgatctgggcactgtctcaacgagagactcggtgaaattatagtacctgtgaagatgcaggttacccgcgacaggacggaaagaccccgtggagctttactgcagcctgatattgaatgttggtacagcttgtacaggataggtaggagccttggaaaccggagcgccagcttcggtggaggcatcggtgggatactaccctggctgtattgaccttctaacccgccgcccttatcgggcggggagacagtgtcaggtgggcagtttgactggggcggtcgcctcctaaaaggtaacggaggcgcccaaaggttccctcagaatggttggaaatcattcgcagagtgtaaaggcacaagggagcttgactgcgagacctacaagtcgagcagggacgaaagtcgggcttagtgatccggtggttccgcatggaagggccatcgctcaacggataaaagctaccccggggataacaggcttatctccccaagagtccacatcgacggggaggtttggcacctcgatgtcggctcatcgcatcctggggctgtagtcggtcccaagggttgggctgttcgcccattaaagcggtacgcgagctgggttcagaacgtcgtgagacagttcggtccctatccgtcgcgggcgcaggaaatttgagaggagctgtccttagtacgagaggaccgggatggacgcaccgctggtgtaccagttgttctgccaagggcatcgctgggtagctatgtgcggacgggataagtgctgaaagcatctaagcatgaagcccccctcaagatgagatttcccattccgcaaggaagtaagatccctgaaagatgatcaggttgataggtctgaggtggaagtgtggcgacacatggagctgacagatactaatcgatcgaggacttaaccacattttgaatgatgtcacacctgttatctagttttgagagaataagtttttcaaaaaaacacttgattttctcaagaatacatagtataatgttaaatgtcactgaaattgtctggtgatgatggcgaagaggtcacacccgttcccatgccgaacacggaagttaagctcttcagcgccgatggtagtcgggggttccccctgtgagagtaggacatcgccaggcagacttcattccgcagtagctcagtggtagagctatcggctgttaaccgatcggtcgtaggttcgaatcctacctgcggagccattattggagagctgtccgagtggtcgaaggagcacgattggaaatcgtgtaggcggtcaactccgtctcaagggttcgaatcccttgctctccgccactgatacttatacataattacaattgaaagtctgggcccgttggtcaagcggttaagacaccgccctttcacggcggtaacacgggttcgaatcccgtacgggtcattatatgatggaggattagctcagctgggagagcatctgccttacaagcagagggtcggcggttcgagcccgtcatcctccaccattatatcatcgcggggtggagcagttcggtagctcgtcgggctcataacccgaaggtcgcaggttcaaatcctgcccccgcaaccaaattttaaaatggtccggtagttcagttggttagaatgcctgcctgtcacgcaggaggtcgcgggttcgagtcccgtccggaccgccatttaaatacttaggctcggtagctcagttggtagagcaacggactgaaaatccgtgtgtcggcggttcgattccgtcccgagccaccacctatgccggtgtagctcaattggtagagcaactgacttgtaatcagtaggttgggggttcaagtcctcttgccggcactgttttttcaaaatttaatgtggaggggtagcgaagtggctaaacgcggcggactgtaaatccgctccctcagggttcggcagttcgaatctgcccccctccaccatttataggggcatagtttaacggtagaacagaggtctccaaaacctccggtgtgggttcgattcctactgcccctgccaaatttatgacatcttgagattatggcggttgtggcgaagtggttaacgcaccagattgtggctctggcactcgtgggttcgattcccatcaatcgccccatattatcattgggctatagccaagcggtaaggcaacggactttgactccgtcatgcgttggttcgaatccagctagcccagtctcactttttatatcaactgcatataatgtattaagtccattaaaaatgcggaagtagttcagtggtagaacaccaccttgccaaggtgggggtcgcgggttcgaatcccgtcttccgctccaattacggcggcatagccaagtggtaaggcagaggtctgcaaaacctttatccccggttcgaatccgggtgtcgccttcttattgccggggtggtggaattggcagacacacaggacttaaaatcctgcggtaggtgactaccgtgccggttcaagtccggccctcggcaccaattttacttacatggtaagttgaattggtgtttgtgttttatcattataactaatcatattaatgatctacttatgtagatcatttttttaatgctttgatttatcataacaagttaagttccgaggcctattataaagcggctgtatagctagtctttcaacacttttattttatatttccataaaaacttttttgaaatacgttgacactttatgagattcatgatatatttatattcgtcggttagatacgacgtaaaacttgccggtgtggcggaattggcagacgcgcacgactcaaaatcgtgttccttctggagtgtcggttcgaccccgaccaccggtatactgaaaaacccgtttcttaacagaaacgggtttttattttttattaaagaaaaggagccgaggctcctttttatacttactcagcgtattggtctaggatctcttctagcacctcttctagctcttctgtatcttcaagctctgattggctgaaacggacgcgtacaagctgttctccgtcattatacatctcttccagccaccctcggagtcctcttgctctgcggtcgacttcgaaaatgatttccaaaccgtcttcgtctaaaaggaaaatgagctctaattcatcaagcatctgacgataatatccggaagtcggaacgaattcgaattcttgaacaaacggaagacgacgctggaagtatggcgcttgttcgcagtctgcttcgttaagacggaagcccaggttttcgattgcttcaagcacattttcaatccaagggtgcgcttcaacgaaaatacggtcatgatcggatttatcgataccgccttgaatgtcaaggtctgtcaccacggcaacctctactttccctacagtgatcggcgtatctagaggcagagtgaatgtgaacggaaattgatgctcttcaccaggctgtatggtaaatgaaccagtgacccggaaagaatgaattgtagcgtatttccggtgctcttcatcgtcttttacaatgacataccgtgtgctaagctgtaaatcgatataacggatgtcctgagcgatttttccgcctttgacatgtaccgttccctgtacttcttctcctggaaaatatgcgtctttttctaaaattgtatctacttttgcagctccaattccggcacttgccgcaagcttcttaaaaaatgacatgttagatcttcccctttttcttttttctcaacagatatacgtaagaaggaggaaaaaagattcgtttgattcatacttttttcctattattcgtctcggcctagggacagactaagaataatattgaaaataaaggagtggatggaagtgaataaagaaagtttggttgcagatgaattacacagaatgtttttggccggtgagctgcaaatcacagtagaggaggatataaacagtatttccgaaaggctgagaaacggtgatctcagtttagaccgattaagcggtgaagacgcgtttataaaagaaacggtaaacgaggctttaagaagagtggagcaataaaaaagagacggcatctcatctttgagatcccgtctctttttgtggtctttactgcaagataaaagcgtaattgctcacccgagccaccccttttctaacagaagatctgacagttcatcatggagataaacagttgtatctaattgatcatgcaatgctcttctgatgtggggattttcggcttctgttattgcgacagtgtatttgttaatgctggtttttattgttgttaacaaatcaagaatatctttgggacaaagactttgttcaatgggaaaccacctcctttgttttttagcagctcctgataagaaagtatttggctttgtttcttgcttctatacaaaatgctataataagcaacaaattttgttggggggtgtgatgatgaagcagattattgcgatgggaggcgggggtttttcgatggagccggataatttgtccctcgatcaatatatcctcaatcaatcaaaacgagagcagcctcgtatttgttttttgccgacggcgagcggagattcccaaaactatattcagcggttttatcatgcatttcaaacattggattgcgtgccgtctcatttatctttgtttaagccgccatcatcagatttagcttcttttgttatggaaatggacgtgatttatgttggcgggggaaatacgcggaatttacttgtgttatggaaagagtgggggctggaccatattctcagggaagcatggaagaacggtgtggttgtagctggaataagtgccggtgcgatctgctggtttgaagaaggggtgacagatcagccggaccgctgacaagtttgaaaagtttaggttttttgcaagggagcttttgtccccattatgacggggaaaaggatcggagaccggcgctgatatctaacaagttcttatgcagtggctatgcagcggatgatggggctgctctccatttcataaatgatcagctgtttcagactgtgagttcaaggtcgggtgcaaaggcatatcgggtgatgatggctgaacatgaaatagctgaaatcccgttgccggtcaaatatttagggtgaaattggctgaatattatctatattcctctttttttcagattgattttatgataagatgagtgcgaaatcaatagttactgggggtgcccgctttcgggctgagagagaaggtaagcttcttaaccctttggacctgatctggttcgtaccagcgtggggaagtagaggaattgtttttgttattgtcttgctgggcaataatatgtttctttctgactgtaaccgggttcatttatatgaatccggttttttgtgctggttatgggcttgattttgtcctttcaaacgtagagaggggaaggaaaagtaatgcaaaacaattcagtgcagcaagccaacatttccattatgtcaagtttttcaggcagcaagaaggtatacgtggagggttcttcttcggacatccaagtgccgatgagggagattgcattgagtccgacgacgggatcgttcggcgaagaggaaaacgcgcctgtgcgtgtctatgatacaagcggaccgtatacggatcctgaagtaaccattaatattcaagaaggattaaagccgctccgccaaaaatggattacacagcgcggtgacgtggaagagtatgaaggtcgggctataaaaccagaagataacggttataaaaaagcaaatccaaacgtaagctacccaggattaaagcggaaaccgctgagggcgaaggcaggtcaaaatgtcacacaaatgcactatgcaaaaaaggggatcattacacctgagatggaatttatcgccattcgtgagcatgtgtctcctgaattcgtcagagacgaggtagccagcggccgggcgattattccttcaaacattaatcaccctgaaagtgagccaatgattatcggccggaattttcatgtgaagattaatgcgaatatcgggaattcagcggttacgtcatccattgaagaagaagtggaaaaaatgacgtgggccatccgctggggagcggatacgatgatggatctctctaccggaaaagatattcatacgacgcgtgaatggattatccgcaattgccccgtgcctgtgggaactgttccgatttatcaggcgcttgaaaaagtaaacggcgtagcggaggatttaacgtgggagatttatcgtgatacgctaatcgagcaggcagaacagggagtggattattttacgattcacgcgggtgttttgcttaggtatgtaccgctgactgccaaacggacaactggtattgtgtcacgcgggggagcgattatggcgcagtggtgtctggctcatcatcaagaaagctttttatacacacattttgaagaaatatgtgagattatgaaaatgtatgatattgctttctctcttggggatggtttgcgtcccggatcaattgctgatgccaatgacgaagcgcagtttgctgaattagagacgcttggagagctgacgcaaattgcctggaagcatgatgttcaggtgatgattgagggtcctggacatgttccgatgcataaaatcaaagagaacgtcgataaacaaatggacatttgtaaagaagcgcctttttacacattggggccgttgacaacggatattgctccgggatatgaccatattacttcagcgatcggagcggcgatgatcggttggtacgggacagcaatgctttgttatgtaacgccgaaggagcatttagggctgccaaaccgtgatgatgttcgtgaaggagtcattacatataagatcgctgcgcacgctgcggaccttgcaaaagggcatcccggagcgcaaatccgggatgatgcgttatcgaaagcccgttttgaattccgctggcgggatcagtttaatttatctcttgatccggagagagcccttgaataccatgatgaaaccctgcctgctgaaggagcaaaaaccgctcacttttgttccatgtgcggtccgaaattttgcagcatgagaatttcacaggatattcgggattatgcgaagaaaaacgatctcagtgaagcagaagctataaataaaggattaaaagaaaaagcaaaagagtttgtcgatacgggaagcaatttatatcaataaaaaaaatgaagatggagaatgctccatcttcattttttttagaaaaacagagagcgtcgaagcggcggaatactctgttcaaagcggaaaacattttctggatcatatttcgttttgacacggcggagtcgttcaacgttttcgccgtaatatgttcttggccagtttctgatttcgatatctggccaatttacgtagtctcccatcgtttctctcgaaagggacgttctcagcccctcaatccagcggacattttgtcttttttcttcaggagatgtccagtttgttaagtattcctgggcgatgattgcatcacgataataaaatgccgtttggtcgggagcgatccgtccggctgccccgccgagtgcttgctgccagacactggcgttttgattcggagcgtgctctaaaaagtgttttattgttgagatcggacgttctgataatggcttttcaatgaaagagccggagcgtttcattttttgaggctgattgcctcccgggctgttaaaaaaggttaccgcttcgatgaacggcattgtttttaccattccgcttgttgggcttcctgctttcaataaagtctttaacagtttttttaactctgtttttggcccgacaaattggccgagggcttctatgcggtttacttctttaggccaaaactctattgatgatgtaagccggtcatctgtatacggggcccagtgctgccacgtgttaaatacttcctcaaaatcatcccatccccatgtaatagaaaaaatcgacacttgagagatgggcactgctttaaatgtcatggaggtgactatgccgaaattgcctcctccgcctccctgagacgcccaaaataagtctggatgatttgaacagctgactgtaatcagatcagcgccctctttttcgtctgctacgatcatctcaagctgcacgaggctgtcgcaagtaaggccggcagcccttgttaaaagtccaattcccctccgagagttaaacctgtgagccctacattggcaatggtgcctgcgggaagcgtcaggccgtattgccagagtgtccgatagacttctcccaattcagcccccgcttcaatataggccagctttttatcctgattcacagttatttttttcatttcgcttaaatcaataacaagaccgttatttaaaagggaaaagttctcatagctgtgtctgccgcctctaatacggaaaggcacacggttttcacgcgcccatttcagcgcattgagtgcatcctgtttgttttggcaaaacacaatgatgtcaggatacctttctaagcttaggttaatattggttcttgcttcgttatagtccggatcatcccgtgtcacgatacgtccggtcaattttgtcttttccacactcccacatctctttctctcgtattctagtttctctagcttatgcgtcaagggaaaagagtgtataaggaaaaagcggggatgcaatctgatacagtgtcaactcccttaaaaaatagttgacaggtcggtattgtatgaattaacatggtcagtacaaatttttcaaatttatcgcgctgatcggaacaccgaaggctcttatcgtttagataagggccttttttgtatgaaaaaggagggattattgatgggagtcaaaaaagaaaaggggagaaaacgattcagaaagcgaaaaacctacgggaatcagattttgccgcttgagctgctgattgaaaaaaacaaacgagagattataaacagcgcggagctcatggaagaaatttatatgaagattgatgagaagcatacgcaatgtgtaactaaatagaaaaaaacccgctgattacagcgggtttttgcatttctacattaagcatcttttttaatcggcaatccaaggccttctgccacgcgttttccgtattcaggatccgctttgtagaagtgctcgatttggcgcagtttgatttcttctttttctaccggcttcatagcattaacgatattttcaacaaggcgggtacgttcatcttcactcattaaacgatacagatcaccggcttgagtgtagtgatcgttgtgatcgtagcttacgctgtcagcgatgccttgtaccggatatgctgcttgcttatcctcaggtgactcttttggaccgccgaagctgttaggctcgtaatacacagatccgccgccgttatcatcaaagcgcatttgtccatcacgctgataattgtttactttgttgcgtgcgcggttgattggcagcgcttgatggtttgcaccgacacggtagcggtgtgcatcatgataagcaaacagtcggccttgaagcattttatccggtgaaacatcaataccaggcacgagtgttccaggtgaaaatgtcgcttgttctacctctgcaaagtagttttccggatttctgtctagaaccatgcgtccgacctcgattaacgggtagtctttttgagaccaaacttttgtgacatcaaacggatcgaaacggtacgtgtttgcatcttctaaaggcatgatttgcacatatagtttccatgcaggataatcaccgttttcgattgcattgaaaaggtcttctgtatggtaatcagggttttcaccggcaatttttgctgccgtattgacatcaaggtttttcacgccttgttccgttttaaaatgatatttaatccatacgccttcgccttcggcatttgtccatttgaatgtatggcttccgaagccgtgcatgtggcgaagtgttgcaggaattccgcggtcagacatcaggattgtcacttggtgaagtgactctggtgaaagtgaccagaaatcccatacagccgttgggtttttcaggtgtgtttttggatctcttttttgtgtatggatgaaatcagggaacttaatcgcatcgcggataaagaatacaggcgtattgttgccgacgatgtcgtagtttccttcttcagtataaaatttaacagcaaatccgcgcgggtcgcgaactgtgtcagcagagccaagttcaccggcaactgttgagaaacggatgaacaacggtgtgcgtttgccgacttcagaaaggaaagcggctttcgtgtattttgttacgtcgtttgtcacttcaaaatatccgtgtgcgcctgctcctttggcgtgaacaacacgttcaggaacacgttctcggttgaaatgggccaatttttcgagtaaatgtacatcttgaattaaagttggtccgcgagaaccggcagtcattgagttttgattatctccaaccggagcgccccagctagttgtcagtttatttgaactcatgttatcacctcttggaatttataagaacataatatcatctctaagtaaaaagtcaatattattttataattattataaaatagttatctctattaagcgatatctagtattgaaagtgtggaaaaaccttgttggaacagctttttatggcacttgataatttttgaagaaataatttttccttctctatttgcgaaacaagcagagtaagtgataaacaaggatatcaaaaatcgtatttaaaaaagagttgacatatcggaataatttgaattaacatgttattcaaacaaaaaacaattgggcagctgatcggaccgccgaaggctctcatctctacaagaacagagatgggggcctttttgttttttttgaaggcggggttggcagaaagagagggataaaagtggctgtgaccatcagcatcaaagaaaaggcatttgttcaagagggccgcaaaaacacggtcttagagaacatagaattatcaatcgcaccaggcgaatttctaacgcttatcggaccgagcgggtgcggaaaaagcaccctgttaaagattattgcagggcttgattctgaatatgacgggagtgttgaaattaacggccgcagcgtaacagctccgggtattcagcaaggatttatttttcaggaacaccgcctctttccttggctgactgttgagcagaatattgcagccgacttgaatttgaaggacccaaaagtcaaacaaaaggtggatgaactgatcgagattgtcagattgaaaggatcggaaaaagcatatccgcgcgagctgtcaggcggcatgtcacagagagtagccatcgcccgggcccttctgcgggagcctgaggtgctgcttttagatgaaccgtttggtgcactcgacgcttttacaagaaaacacctgcaggacgtgctgctggatatatggaggaggaaaaaaacaacgatgattctcgtgactcatgatatagatgaatctgtttatttaggaaatgagcttgcgatccttaaggccaaaccggggaaaatccataagctgatgcccattcacctggcgtatccgcgaaaccggacgactccggatttccaagcgatcagacagagagtgctgtcggaattcgagaaaacagaagatttggagtacgcagaaggatcagggatatagaaagggcggaagcggaaatgaaaaaaggactcattgtattggttgccgttatttttctgctcgcaggctgtggagcaaatggagccagcggtgaccacaaacaattgaaggaaatacgtattggtattcagcaaagcttaagcccgcttttgatcgcaaaagaaaaaggctggttcgaagatgcatttgaaaaagaaggcatcaaagtgaaatgggtggagtttcaaagcggtccgccccaatttgaaggccttgcggcagacaaacttgatttttctcaagtcggtaattcgcctgtgatcgctggacaggcggcaggcattgactttaaagaaattggcttatctcaggatgggttgaaagcgaacggcatccttgtcaaccaaaacagcggcattcaggacgttaaggacttaaagggaaagaaaattgcagtcgctaaaggcagcagcgggtttgattttttgtataaagcgcttgatcaagtggggttgtcagctaacgatgtgacaattattcagcttcagcctgatgaagcagcttccgcatttgaaaacggatctgttgatgcctggtccatttgggagccgtacttgtccttagaaacaatgaaacacggggcaaaaatccttgtgaacggagaaagcacagatttatattccccgggttttactttagtaagaacaaagttttcagaggagcatccagacgaagtggtccgttttctgaaggtgtttaataaagccgttgtatggcaaaaggaacatctggatgaagcagcggacttgtattctgacattaaagatctcgataaaaaggtcgtcgaaaatgtgctgaaaaatactgaacctctgaatgaggtcatcagtgacgacattgtgaaagcgcagcaggaaacagcagattttcaatttcgaacaaaggcgatagataagaagattgatgtgaaggatgttgtcgataacacttttatcaaaaaagcattaaaggaacattcctcaggaggtgatcaatgatgaaagcagaggctgcgggctcgctgcccaaaacgaatgcggaagcggtgcgaaaaaagcccggaaggaagagatacggctggatgaaggggcttttactgcccgctgtcatcattgccatctggcaggtcatcggcgggctgggggttgtgtccgctacagtgctgcctacacctgttacgattgttctgacctttaaggagcttattttgtccggcgaactgttcggccatctgcaaatcagcatttatcgggcggcacttggttttttgcttggcgcggggcttggattgatgatcgggattttggccggattttccaaacggacggagctgtatcttgatccgtcgttgcaaatgcttagaaccgtacctcatctggccgtcacgccgctgtttattttatggttcggatttgacgaagtatctaaaattttgctgattgcgctcggtgccttctttcctgtctatatcaatacgtttaacggcatccgcggggttgacgcgaagctgtttgaagtcgcccgggtgcttgaatttaaatggcatcagcagatatccaaagtgatattgccggcagccctgcccaatatattgctaggcattcgcttatcgctcggcattgcatggctcgggctcgttgtggcagagttgatgggctcaagctcgggagtcggctatatgatcatggatgcgagacagttttcacaaacgaataaagtctttgcagggattatcatttttgcagtggttggaaagctgacggattccttcgtcaggctgctggaacgaaagctgttaaagtggagaaacagctacgaaggataaaagatataaaggggagatgaatatggaaattctttggtttataccaactcatggagacgcgagatatttaggatctgaaagtgatggacggactgcggatcatctttactttaaacaagtcgcgcaggcggcagacaggctgggatatacaggagttcttctgccaacgggaagatcgtgcgaggacccgtggcttacagcgtcggcactggcaggagaaacaaaggacttaaagtttttagtcgcggtaagacctggtttaatgcagccttctctggcagccagaatgacatccaccctagaccgcatttcagacgggcggctgctgatcaacgttgtggcagggggcgatccgtatgagctggcaggcgatggcctgtttatcagccatgatgagcgctacgaggcaacagacgaatttttaaccgtttggcggagacttttgcagggagaaacggtttcctatgaaggaaagcatataaaagtggaaaacagcaatctgcttttcccgccgcagcaagagccgcatccgcccatctatttcggtggttcgtcacaggctgggattgaagctgccgcaaagcatacagacgtatacttgacatggggggagccgcctgaacaagtaaaagaaaagatagaaagagtcaaaaagcaagcggcaaaagaagggagatccgttcgatttggcattaggctgcatgtcattgcccgtgaaactgaacaagaggcatgggaagcggcagagcgcttgatcagccacttggatgatgacaccattgccaaagcgcaggcagctttgagccgttacgactctacaggccagcagcggatggccgtccttcatcaaggcgatcggacgaagcttgaaatcagtccgaatctgtgggcggggatcggcctagtcagaggaggggcaggaacagctcttgtcggtgatccgcagacgattgccgaccggatagcggagtaccaggcactcggcatagaatcgtttatattctcaggctatccgcatttagaagaagcgtattattttgcagagcttgtatttccgcttttgccgtttgaaaatgatcggacgagaaagcttcagaacaaaaggggagaagcggtaggaaacacttattttgtcaaagagaaaaatgcatgagtttaataaaaatacagcccccaaacatggtatgatattcaaaaaaagggggctttttttctgaaaacattgagaagcgcggcagtcatttgcctcatagctatgctgtcagcatgcggacattcaaaacagatggaaatcaaagcggcggacatatcagaacttgaaaaaaacagaatggatgtcgcagcttcacaggcattcactgccgaagccgtcaatatcggtgaaggtgtttcttcagctgacatgtacatcgaacattatcaaaagggaaagcttgttgagaggtttggaccggctagtgcagattattcagaggaaaaacccgataccatacaatttgtttattttgagaaggaagagggggaaggaaagaataaacataccaccattcattttggcattgtggataaacagggaaatatagcggctgattcatcggtgaaacgtgacgatagcacaacacaggaaatgactcagaatatttcatcgccggaaccgattactttcgagaagcctgctttgatcggcagcagtattagagggactgacgagacaatgcacacctctgaacataaaaaagagctcattaagcatcaagatgcgttactgtattatgtggaattgcatcattagaatgggcggcttcaggccgtctgttttacaaagcggtatgcttgcttttttgaatggtgcatgatacattttaaatagtaacaatttcgatttaaagggaggctatgtgacttggctaaaaaatcaaaagtggcaaaagagttaaaacgccaacagcttgttgagcaatacgctgatattagacgcgagttgaaggaaaaaggagattacgaggcactcagcaagctgccaagagattcagcaccgggaaggcttcacaaccgctgcatggtaacggggcgcccgagagcatatatgaggaagtttaaaatgtccagaatcgctttcagggagctggcccataaaggccagattcccggtgtgaaaaaagcaagctggtaagaaaaaactccggccgattacagcgcgccggagtttttttcgtttttcttgaaagagatgacgtaggaaaggtgctggatgatcatgatgataaacacaataataatagggaaaaacggaatacgcgattgaaaaagcggataaaaaatgagaagaaccgctgcggcaggcagcgagaagtagacagcgatatatgacgcgcgacatgcttttgccgtcatcatctgctctctttcatcctgctcttcaaactcatcaggcagaagaagctgctttctggcagggcggctttttttctgtaagtacaaataaaccgcaaacgccgcaacaaacagaataaagggggtgaggtttaattcaaataccatcccgccgctctttgtgccgaaaaaagatgctatgccttctgaggcttcaaagtatgaaatcagcgcccagcatgcaaggccaaataaaacaaggtgaaaagctgcttttgttttcatgctcatcttagttttcctcctctaaccaaaagacatcctccattttcatggagaaggctttgcagattttcagtgctaacagcagtgagggaacataatcgcctttttcaatcgctgccacagtctgtcttgtgacgccgaccgtttctccgagtttttcctgagaatagccgaagcgtgccctcagctcttttactttatttttcatcatgacgtctgtccccttcacaatctcgattgattatattgtatagtatacttaacattatgtaaatggaacttaacaactttacaaaaagataactttttttcgacaaaatttttatattcccttgacgaaaaataaataaacatgtaatataaaaaaagtcagagcggtactgttgctgacaatcacaaatgcgggtgtagtttagtggtaaaacctcagccttccaagctgatgtcgtgagttcgattctcatcacccgctccatacatacgttattaacgcagtgtttcgtttctcagataaacgaagtattgcgtttttttatgtaaaaaagaacacgacattcgtgttcttttacgtaagccaatgtactgtatgggtgccgccgtgaatttgttcaaacattttcgttaatgatgataagaggttaacagcgctgcttttctcaatcgatggcgggaaaaaaatgatttgcagcatattcttagtctcgtttgaaacgggatagtggttgacgctgtttttgaaatcgccaaaaatgccgttttcatcagagaaaagcagtatgttttctttttctcccaatgagatccggaccggctcatgaagctttccggcatcataaatcataataggcagagaatattttaatgcgaaaaaatcgattgtgtcatgggccgagtctttactttccatgaattgttccttggatatcgggaccagcatgtcctccattggggttgtttctccctcaaatgaagggttaagctgtttaaagagtttctgccattccttgacgaaggattcatcggatataccgccgtccgcatagtcgaaaaacaaggattcttgaaacaggcggagtctgcctttcagcatttgcggtgaggagccgacttcgatattctcataaatgacagcagctgcatgtaagccggccgcacgttcagtaataacagaatcaagtttgatattcactagcattcactccagttacgtgatatcaacctattataaacgctgtatcgttttatcacaaagaaaggaggctgtgcaaaacatgaacgtttatcagctcaaagaagaattaattgaatacgcgaaaagcattggcgtggacaagattggttttacgactgctgatacttttgacagtttaaaagaccgtttgattcttcaagaatcactcggctatctctccggctttgaagagccggatatcgaaaaaagggtgacgccgaagcttcttttgccgaaagcgaaatcaatagtggcaattgctctcgcatatccttccagaatgaaggatgcgccgagaagcacgagaactgagcgcaggggcattttttgcagagcttcctggggaaaagactatcatgatgtgctgagggaaaagcttgatctactggaggattttctaaaaagcaagcatgaggatatcagaacgaagtcaatggttgatacaggtgaattgtctgatcgcgccgttgcggaacgtgccggaattggattcagtgcgaaaaactgtatgatcacaacacccgagtatggctcttatgtgtatttggcggaaatgatcacaaatatcccttttgagcctgatgtgccgattgaagatatgtgcgggtcctgcacgaaatgcttggacgcctgcccaacgggagcactggttaatcccgggcagcttaatgcgcagcgctgcatctcttttctgacccagacaaaaggatttttacctgatgaattccggacaaaaatcggaaaccgcctgtacgggtgcgatacgtgccaaacggtatgccctctcaataaagggaaggattttcatcttcatccggaaatggagcctgatcctgagattgccaaaccgttattgaagccgcttttgaccatcagcaatcgggaatttaaggagaaattcgggcatgtctcaggttcttggcgcgggaaaaaaccgattcagcgaaacgccattctcgcgcttgcgcattttaaggatgcttccgcactgcctgaattgacggaactgatgcacaaggatccgcgtcctgtcatcagggggacagccgcatgggcaatcggaaaaatcggagaccccgcctacgcggaagagcttgaaaaagcgctggaaaaagagaaggatgaagaggcaaagctggaaattgaaaaaggaattgagttgctaaaagcttcaggcatgactaaacaaggcctgtcctgacatacgtatagagcagaaggaaaaaacacttgagatcatccaagtgttttttctctataaaaaagtatggcgggtggggtgagcttgaagtacattttagaacaattagcggaggagcggctgggctttctggttaacgggcatgctatgagacaggagtctcaagtcggagaccttaaagtcatggagcgtaagaaaaagcttctggaaaaacgtaaagttgacatcataaaagcgaaagcaaaggccgtgattaatcatgtgcgggttgaggatgacggaacgacctgcctttcgtataccatccattacgaatacgtgtgtaaggaacaagatgacagcttgtatatagaagagcacatagaggagcgaatggctttcctgtatgatcacattttgattagtgatcaggaaattgcgaaaaagccggctggatttcatgaagggaccagtattattgactattctgaagctgaagaggaaagagaagcgtttggcagggcttttcaatacgatcgtctcggcgctgtccaatatgccgagaaattttggaacaagcgcaatcctgcttataaaaatttcagcgataactgtacaaattttatttctcagtgtcttcatgcaggaggcgcgccgatgcgcggtcatccgaacaggggatcaggctggtggatgaaacaaagctcatggagctacagctggacggtggcgcactctatgaaaatgtatttgtcgaattcaaaggccggactgcgtgcggtgcgggtgaaatcagcggaagaactgatgccgggcgatgtgatttgctatgacttcgaaggagacggccgctttaatcatacaacgattgtcgtggcaaaggacaaaggcaatatgccgcttgtcaacgcccagacctatgacagcaggatgaggtattggtcatatgaggattctacggcatacacgccgtcaatacgatatgccttttttcatatcgttgatgatacgacaaaagagtaattaatgttataatgatgggcggataagaaaaacagaggtgaacattgtggcattacatgtcgttttatatcaaccagaaattcccgctaacacagggaatattgcacgtacttgtgcagcaaccaatacaacgctacacctgattcgtccgctcggcttttcaacggatgataaaatgctgaagcgtgccggactcgattattgggagtttgttaacgttgtgtatcatgattcgttagaagaattgtttgaggcatatgaaaaaggccagtttttctttattacaaaattcggccagcagcctcatacatcatttgattacactgatcttgacgaggattatttcttcgtgttcggaagagaaacaagcggtttgccaaaggatttaattcaaaataatatggaccgctgcctgcgtcttccgatgacagagcatgtcagatcgttaaatctgtccaatactgccgcgattcttgtttatgaagcgctgcgccagcaaaattaccgtgatttaaaatagtgaaaaaacccgctcatcgatgatgggcgggtttttttgcggatgttgaaatgctttgtttcgtttttgggcttaacaacgtaacagtgttatgttacaatgtacccatcaaaggagctggacttatggaagaacaattaatctctaaaaaagaattacttgaaagaacatcgatttcatacggtcagctgtatcgatggaagcggaaaaacttaatacctgaggaatggtttattcgtaaatccacatttacagggcaagagacgttttttccgagagaggagattttaaaacgtatatcaatgattcaaaagatgaaagaaaatttgtctttggatgaaatgagggaaatgctgtcgccgaaaatgaaggatgtcagcatgaccgctgatgaattgcttcataaaggtttggtttcaaggcctgctcttgaagcctattcagaagacggaggaagtccggttttttcatccagcgatttgctttcgctatatgtgcttgagggactgctgcagtctggaaatgtcagccttgcagaagcaaaaatggctgcagaggtattaaagaagcatgataatgaagagattgaaaaacagacggagctgattgtgctccgcaagctcggtgtcacaacttgttttatagcggctgcggcggacagcattttgtttgaatcatccgtaaaggttgtggaacgggtagatttattaaaagcttcagaggaattaaaaacaacatttatgcaggagggccatcgatggatgtagtggaaaagctggtgataaacggatcaggaagttcaaagggaggaacatttcaatctgttgagattaatggcagcgggacagtggccggggacgtggagtgtgacactttttcttttaatggaaacggaaaagctgacggcagcgtcaaagcgaaagcggtaaccatcagcggttcaggaaagatacatggagacgttgaagcagaatctatccggatgaatggcacttgttttattcaaggagaggtatctgcaaaacaattgaaaatcgctggatcatcaacatttggcggcactgtcaaggctgatggcattgacattagcggaaaagctgtcatggaagcagattgtgaaacagaaacctttcaatcagaagggaaatgcaaaatcagcgggcttttaaatgcagaccaggtgatcattaagctttctgcaggggaaagctatgcgcgggagatcggctgccgccatcttcaagtgacctgcagaaaaggaatgctgacattgctcagattgatgccgcagcctgttctaacagcagagctgatcgaaggtgacgtgattgaattgacaaatacaaaggcgaaaaccgtgcgcggaaataaagtgatcatcggcccggattgccagattgaaaccgtcgaatacagcggggactatacctgtgatccaagcgcatcggttgaaacatccacaaagttgtaaggaggatcgtaatggagacaacaaaactgggaaatttaaaattatatggcgctgggcatgccgcaggaggcgcgtatcacaatgtcagcatcaaaggagaaggtgtagttggagaagggttgtctgctgtaggctgccgcatatacggaacgggcctttttctcggaaaagcagagactgagcggctgcgtgtgctcggagaaagtgaatgtaaaggcgatctgacagccggcaaaatcaatatatatgggataatgaaagtcagcggctcacttcaatttgatcgattcaatctgaaaggccagactgaaattggcgggaatatgactggagaatcctgcgatgtgaaagggaagcttagcgtaaaaggtgattgtgaaacagaaatgttccatgtcacaggctgtgttgatgtatcggggttattaaattcgggtgagatcaagctgggattgagccatgatataagccatgtgcaggaaatcggcggaacaacaattacagtgaaaagacgcgcgagtttttttaatcggaagaaagtgaagctgatcgccgatgtcatagaaggcgatcgggtttatttggagaataccgaagcggcagtcgtcaggggaaaagaagtgatcatcgggccgggatgcagtatcggaacaattgagtacgaaaacaaatatgaatgcgatccgcattcacagattaaagaaaaaacaaaactgtaaaacattgttctgttatacaaaaagggtgctctttcaggagcacccttttttattcttttccaggcttgctttcgtatcctgcggtaaaaattgatactaaaaaagtgacaatgacacccatcatgatgattgttttcaccgtctctccccctcttcaatttttccgtgctgtccgagtctggatgattctgtatttttctttattatgaacggtcgcagtctgccttgtcaacgatgtataagtatctttatttttaagaaaccaaagcatgtatcacgagatggcggcatagattgtatcaaagtaccttatttgcatagtgtatcaaacatgatagaggaggtccttatggatatattaaagaaaattgaacagtacagagaggaagagcagcggctgaaatgggaaggaactttcgccgattatttggagattattaaagaaaatccgatggtcgcgcaatctgctcattctcgagtttttaatatgataaaagacagcgggatagaggagattgacgggcgcaagaagtacagtttttttgaccgcgagctgttcgggcttgaagaatctctggagcgtcttgtggaagagtattttcatccggctgccaaacgtctagatgtcagaaagcggattctattgctgatggggcctgtgagcggcggtaaatccacgctggtcacaatgcttaaaaaaggtctcgaagcgtacacgctgacagataatggcgctgtatatgcgattaaaggctgcccgatgcacgaggaccctctacatttaatcccccatcatttacgcgatgacttttacagggaatacggcattagaatagaaggaagtctttctcctttaaatgtcatgaggctggaggaagagtacggaggaagaattgaggatgtgaaggtggagcgtatcttcttttcagaagataagcgtacgggaattggaacattcagtccctctgatccgaaatctcaggatattgccgatttgacggggagtattgatttctcaacaatcgccgagtacggttcagaatcagatccgcgtgcttatcggtttgacggagagctgaataaagcgaaccgcgggatgatggagtttcaggagatgctgaaatgtgatgagaaatttctctggcatttgctttccttgacacaggaagggaattttaaagctgggcggtttgcgttaatttctgctgatgagctgatcgtggctcacacgaatgaaacggagtttcgctcatttatttctaataagaagaatgaagccctgcactcaagaatcatcgtgatgccggttccttataatttaaaagtgtctgaggaagagagaatttatgaaaaaatgattgcagaaagcgatgtggcggatgttcatattgccccgcatacgttgaaggtcgccgcgatgttctcaatccttacccggttaaaagagccgaagcggtcggatattgatctggtcaagaaaatgagactgtatgatggggaaagtgtggaaggatataactctgtcgacgttgaggatatgaaaaaagaatataatgatgaaggcatgagcggaattgatccgcggtacgtgatcaaccggatttcttcaacgattatcagaaaaaatatggaatcgattaattctctcgatgtccttcgctccttaaaagaaggtcttgatcagcacccatcaatttcaagcgaggacagggagcggtatttgaattttatttctgccgcccgcaaggaatatgacgatattgcgaaaaaggaagttcaaaaagcgtttgtttattcatatgaagaatcagcaaaaacacttatggacaattacctcgataacgtagaggcctattgcaataaaaacaagcttcgtgatcctttgacaggagaggaaatgaaccctgacgaaaagctgatgagatccatcgaagagcagatcggcatttcggaaaacgccaaaaaagcgttccgcgaagaaattttaatccgcatctcggcctatgcgagaaaaggcaagcggtttgattacaattcccatgaaagactgcgtgaagctattcagaaaaagctgtttgctgatctgaaggatgtcgttaaaattacgacctcaacaaaaacgccggatgagcagcagctgaaaaaggtaaatgaagtcgtggcccgtttaattgatgagcacggctacaactcgacgagcgccaatgagctgctgaaatatgtcggcagcctgctgaaccgataagcaacgtgacccgtccgaatagggcgggttattttgtcccattttctaaatagtttgtcaattaaacgtgcatatgtgcatatgatgaatataaatcttttcaaaagacttgtttcataatctggcacaagccggaatacgtatgtatcacgaccacaaatggttaaggaggggaattcatgtcccaaaatgacagcggccattttttgatttctgaggaaaactggtccctccatcgcaaaggcttcgatgaccagcaacgccaccagaaaaaagtgcaggaagcgatcaaaaacaatcttccggacctcgtaactgaggaaagcattattatgtctaatggaaaagatgtagtgaagatcccaatccgttcacttgatgagtataaaatccgttataactatgataaaaataaacatgtagggcaaggagacggcgagagccaggttggagatgttgtggcccgggatggatcagacaaaaaacaagggcctggaaaagggcagggtgccggtgatcaggcaggcgaggattattatgaagcggaagtttcattaatggatttagaagaagcgctttttaaagaattagagcttccgaatctccagcaaaaagagcgggacaatatcattcatacagatatcgagtttaatgatatccgtaaaacagggttaaccggtaatattgataagaaaagaacgatgatgtcagcctttaaacgaaacgcaatgtcaggaaaaccgtcgttctacccaatttatccggaggacctgaaatataagacgtggaatgacatcacaaagcccgaatcaaaagccgtcgttttagccatgatggatacaagcggcagtatgggggtttgggaaaaatacatggccagatgcttctttttctggatgacccgttttttgcggacaaaatacgagactgtggaaattgaatttattgcccatcatacagaagcaagagtggtctcggaggaagattttttctcaaagggagaaagcggcggaacaatttgttcttccgtatatcggaagtcgcttgagcttattgatgaaaagtacaatcccgcccgctataacatttacccgtttcatttttctgacggtgacaacctgacatctgataacgcgcgctgtgtgaagctggtcaatgatattatgaagaaggccaatctgttttgctacggcgaggtcaatcagtacaacaggcattcaacgttaatgtctgcatataaaaatgtaaaagatgagaaatttaagtactatattttaaaacagaaatctgatgtttttcaggctctaaagaactttttcagaaatgaagagtctggtgtaagccatcaattttcgtaatgaaaagcccatttcagggcttttttttatttaataaaagcaagaaaacgcttgcgaaaaaaatacgggagaaaaagaaatttttcctttgacaaatcttctttcatttattaatattttatcttgtgaactattattgaggaatgaggtgaaaaggagttgactgaatcagaacgtgctttgctcacttttgaacagctcttcgatacgtctcgggcgatatataaaaaacagaagaagatattggagattgtgcttgagccttttgatattacagtccttcaatatttgctgatgtttaaaattcatcaaagcggaagcaccccgctaagcaagctggcaatgtcgcttgatcttaagcctgcttctgtgacgcggatgacagatattctgtataagcgccaattgatgaatcgatatgacagtccggatgaccgccgtatcgtcatgattcagttaaccgaagagggggaagaactgatagaaaaagccgctgtgcaatatgcaaaaatgggtgctggcttgtaccaaaagcttgatacctcccagctgcagtatttgcgcaaactagccggaagcttaacgaagcttgctgaaggctgttcagaaaaaagcggtaattaaaaacttctcacatattttcaccagctttccgcaaaatgatagaggatgaaacgaaaggagaaaacaaaatgaacagaggacgtttaattctgaccaacattatcggtttgattgttgttcttgcaattatagctggaggtgcttactactattatcaaagcacaaactacgtaaaaacagatgaagcaaaagtagcgggcgatatggctgctattactgctccagcggcaggtaaagtatctgactgggatctggacgaaggaaaaacagtgaaaaaaggcgacacagttgcaaaaatcaaaggcgaacaaactgttgacgtaaaatccattatggatggaacaattgtgaaaaacgaagtgaaaaacggacaaaccgtacaagctggtacaacaattgcacaaacgattgacatggacaacctatacatcacagcaaatattaaagaaacagatattgcggatattgaagtaggaaatagtgtagacgtagtagttgacggagaccctgatacaacatttgacggtactgtagaagaaattggctatgcgactaactcaacttttgatatgcttccatctacaaattcaagcggaaactacacaaaagtaacacaaaaaattcctgtgaaaatttcaatcaaaaacccatctgataaggtgcttcctggaatgaatgcatctgttaaaatttctgagtaaaacagatcagtcatcaaaccatgaaaggaggttgtcttagatggctacaggcaaagaaaaaaatgcaaaaaaccctatgtcattgctgattgtgctaatggcgggtttatttttggcaatcctaaaccaaacactgcttaatgttgcaatgccgcacttaatgactgaatttggcgtaagtgcaacgacgattcagtggcttacaacaggttacatgcttgttaacggtgtattgattccgttatctgctttcctgattacacgatttggccaacggagtctctttctcgtcgcgatgttttgttttacgctcggtacgttagtctgcggtatcgcacctaacttctctacaatgctgatcggccgtttgattcaggccgtgggcggaggtatcttgcagccgctcgttatgacaaccattctgttaattttcccgcctgaaagcagggggaaaggaatggggattttcgggctagcgatgatgtttgctccagcggtcggcccgactctttccgggtggattattgagcattatacatggcgcattatgttttacggtcttgtgccgatcggcgcaattgttatcattgtggctttcttcatctttaaaaatatggtggagccgcaaaaaatcaaactcgatactcttggcgcaatcctatcgattgtcggattcgcctccttattatacggagtcagtgaagccgggtctgacggctggaccgacccgattgtattgtctacagttattatcggagccattgcaattgttgcttttgttgttcagcaattgcgtcatgatgatccgatgcttgatttcagagtgtttaaatatgacattttctcactctcgagtgtcattaatatcattataacagtggcactttacactggtatgttccttttaccgatctatctgcaaaacctggtcggctttacggcgcttcaatccggtctgcttctgcttccgggtgcgatcgttatgctgattatgtcaccgatctcaggtattttgttcgataaattcggaccgagaccgcttgcgattatcgggcttctcgtgacagtggtaacaacatatcaatacacgcaattgacaattgatacaccatatacacacatcatgctgatctattcaattcgtgcatttggtatgtctctcttaatgatgccagtcatgacagccgggatgaaccagcttcctgcccgtctgaacagccacggaacggcgatgagcaacacgcttcgccaaatcagcggatcaatcggaacaagtttaattacgacgatttatacaaaccggacgacattccattattcacaaattgcagataaaacaagcacggcggacccgaacttcctccatgcgttccaaaatgcagtttcgaatttaatggtgaatatgaatgtgtcttatgatacggcgaaaacatatgtgtactcacatatttataaacacgcgtcactcgattccaatgtcatggggataaatgatgcctttatgtgggcaaccttattctgtgtagcaggtttgattttaagtatcttcctgcgtgacgtcagaaaagataaattgcgtaagaagaaaaaagaggagctttcattacttcctgctccaaaagaagctaaggaatcttaatctgtacagggaggtttcctgaatgaaaatttatgtagtgtatgatagtgaaggcgaacatactaaagtgcttgcagaagcgattgctgaaggcgcgagagaaaacgacgcggctgaagtgttcatcgaccatgtagatcaggctgatatccgcaagcttaaagatatggatgcgattatttggggatgcccagggcatttcggaacaatcagctccggtcttaaaacttggatcgacagacttggctacttgtgggctgaaggcgagctgatcaacaaagtcggtgctgtcttctgcacaacggcaacaacacacggcggcttggaaatgacaatgcacaatttaatcacgccgatgttccaccaaggcatgattgttgtcggactgcctggcaacgtgcctgaaaacgcactttatggctcttattacggagcaggtgtcacttgtccggtagacagtgatgagttaatgtctgaggaaggtattcagcttggacgcgcgttgggaagacgtgtcagccaagtcacaggaaacctaacagcaggacagtaaggagaggttgaaatggccattattatagcaataattgctgctgtcattgtcattgcggcccttattacatttaacgtccgcaacgcctcacctggacctgagaagcaagaagcaaccgatagaatcgcacctccagaagagggaaaaaacgaagcgcattaccctgctgaagcaagggctgccgagcatacgccatccgttgtcaaaaacgattctccaaaagagaagcgtgacacaatgggtgatgatatttacaggcaggcgctgcaaaagtttaagcattctgatgaagttcatgcagaagaagaggtcactgaggaaagtgacaaaatgcaggaccgcagctatcgtgatgcgctgctctctatgaaaaataagaaaaagtaatgaaaaaggcaaatccgttttctcatgcgggtttgccttttttgctgtttccatcaattcggtttttatcaaataaatccatggaatatgttgtattccatcttgatctagtgtactatgttactcatacaccgagggttttttctgggaggtaaagacatgaattcttttttaggtttattaaagaaagatatcaagctttcaagaatgtggctgctagtatggatatgcggaatcattttcttattgggaacaggccatattatagcttctcgcacgaaagaacctctagtcatttttggtttttttgttgcagttgctttttttctgcttttcttatctcctgtttttgtgttttatcaccttcgcaaggaagggaaatcacagctttggctgtacaatccaaatggcggcttctggctgttttcttctaaattggcagcatctttgctctatcaatttgtgattcagttggcattaacagcctatggcatatggatgtatcatatgctctctgtaaaaaatctgctggagcatcaagttgatataacgagtacagtggctttgctgaatatgtatgggcttatttcttcgttagatatgtcagtaacagtcattgtgttttggactgtttttcactctctcagaaattggcgcagaatgcggtgggctgcgatggttctgttggttgcagtgtggttattcttcgatgaatacatcataagccctttggttgaatctcaaaagcatttctggcctgtaacagtctattgcaattttgatttccacttctacaatgtttggagattggaattaaaacctatccatctgtctgtgctagggtttcctattactttagtcatcacattcttgctgctcattatggcttcaaaactgcttgatcgtaaagtagaggtgtaaatatggacaatcaattccaatcctcgaaaccgatttatctgcagatcgctgatcagatcttttataggctggtcaggaaggagctgctcccaggagacaagcttccttcagtaagagaaatggcgattcaaactaaggtaaatcccaatacaattcaaagaacttacagtgagatggaaaggctgggtattgtggagacaagaagaggtcaagggacgtttattgcggaaaaagcagaaatcgtagacgagctgaaagacaagctgacacgagaggtgctggaaggctttgtcaagcaaatgaaagagctggggctaacgaaagaggaaatggtagaagggattaaaacattcacagagggaggctaaaatgggaatcaagctagaacatgtatcaaaaaaatacggccgccatacggccgtcaatgatgtgtcaatcaccctatcatccggacggatttatggcctgatcggaccgaacggcagcggcaagtcaacgaccctgaaaatgatggctggccttctgtttccgacttcaggatttgtgaaagttgatgaagagcaggttacgagagaaatggtgcgtcaaacggcttatcttactgagcttgatatgttttatccgcatttcactgttaaagatatggtgaatttttatcagtcgcagtttcctgattttcaaacagaacaggcttataagctattgaatgagatgcagctgaatccggaaaaaaagatcaaaaagctatcaaaaggaaatcggggccggctgaaaatcgttcttgctttagcgagacgggcagacgtcatcttgcttgatgaacctttttccgggcttgatccgatggtcagggattccatcgtaaacagccttgtgtcgtacattgattttgagcagcagattgtcgtgatcgcgacacatgaaattgatgaaattgagactttgttagacgaagtaatcatcctcgccaatggagaaaaagttgcgcagcgtgaagtagaagatattcgtgaacaggaaggcatgtctgttttgcaatggtttaaatcaaaaatggaagtttgctagaaagaggaggaatatgatgaaaacagtgttggaattgaaaaacgtgactaaaaacatcagaggccgaacgatcattgatgatctcagttttacgattcgtgaaggcgaggtattcggttttttgggaccaaacggagcggggaaaacgacaaccatccggatgatggtggggttaatgaagctgtcgaaaggtgatgtcctcatttgcggccaatcaattacgaaagaatatgccaaggcgattaagcatatcggagcgatcgttgagaatcccgagctgtataaatttttgagcggatataaaaatctccagcaatacgcaaggatggtcaagggtgtcacgaaggaaaaaattgatgaagttgttgaactggtcggtttaacagacagaatccacgacaaggtgaaaacatattctctggggatgagacagcgtcttggcttggcacaatgccttctgcacgatccaaaagtgctgattttggatgaaccgacaaacggccttgatccggcggggatcagagaaatcagagatcatttaaagaagctgacccgagaaagaggaatggctgtcatcgtttcaagccacctgctgtcagaaatggaactgatgtgtgatcgaattgcgattctgcaaaaaggaaagctgatcgatattcaaaatgtaaaagatgaaaacattgatgagaacgatacatatttcttccaggttgagcagccgaatgaagccgctgctgttttaaatcagtacgatttgctgagtaagacaaatggtgtagaaatcaaactggctaaagacgaagtccctgcggttattgaattgctggtgatgcagcaaatccgtatttatgaggtcaaggtcataacaaaatcattagaggaccgtttcttagaaatgacaggtgaaacaaaagaggaggttcagcatgcttaatttgatttataatgagtggctcaaaattttcagccgtgccggaacatgggtgatgatcggaattctggggctgacaatggttggatttgcatttttagcgaatcatttttctgctggtgaatcaaattcccattggaaacaagaacttcaagcacaaaacgccgaattaaagaaagaaatcaaagaagatccttcactgaaagatgggtataaagaaacaatcacactcaacgactatcgcatcgagcataatatccctagtgacacgggctatacggtatggtcttatgtaacggattcagcaaactttaccatccttaccggtctgtttactattatcatcgcggccggaattgtcgcgaacgaatttaattggggaacgattaagctattaatgattcggccgctcagccgttttcaaattttgatgtccaaatatattacagttctcctgtttgggctcctgttgctgttgattttatttatcggttctactttattagggttgatcttcttcgggacgggtggtgaaaccgccgcgaatattcatttaatctataaggatggccatgtcattgagcaaaacatgatggggcatttggccacaacgtatctttctgaatccgtctcagccttaatggtggcgacgatggcgtttatgctgtctgcagtattcagaaacagctcacttgcagtagggttttccatctttttattggttgccggtacgactgccactgcatttattgcagcgaagtttgactgggcaaagtatatattgtttgctaatgtcgacttgactcagtatgtggatggcacaccgttaataaaagggatgactatgacgttttctatcgtcatgctggcgatctactttatcatcttcttgttgcttgctttcggaatcttcatgaagcgggatattgcaaactaataaagaaagctgttttgcataagcaaaacagcttttttgtcaaaataaaaactgcaggtttgcacctgcagtttttcatatcaatttatgcttacgcttctttagtaacgttagcagcttgtggtccgcggtttccttcaacgatttcaaaagaaacagcttggccttcttctaaagttttgaagccttcgccttgaatagcagagaaatgaacgaatacatcgtcttgaccttctacttcgatgaatccgaaacctttttcagagttgaaccattttactttaccttctaacatgaaatttcctcctaaagcgatcataacgcttaaattcactattcttgctcttaacaaactttcaagacgaaaactcttacaaaactttcttcttaaagatagttcgaacaaaaataattacctttactctaccagtaatcttcagaaaaaacaactgcttattgaaacttttttcggaaaataccatatttatttttcaatttgatatttatttgcggaaattcatctgctttctcgatatgtgatcatacgtttgccttagtattccttcattttgggaagataagtaataggaattgacaaccttattggatatgagtaaggtaaaagttaatcaatattacaaatgacaacgtttatcaactaagagagcgtatgatttttatgtctgatattgcttgcatgctctaatacatagataggagtatggtcacaatgaaaaagtggcttatatgcagtttcgtccttgttcttctcgtttcatttactgcatgttcaccgtctgcagaacatgaatcgataaaaatcgggattgctgagtctgacggggcaatatggaactatattgctcaaaaggctgaagaggcagggctggatattcagctgatccctttttctgattatgcggagtctgatatcgcacttgctaacaaagaaattgatgccaacgcctttcaaaccatttcatattttcagtcgttcacccaaaaatacaaacttaatttgacgccgctcgggacgacatacataacgcccatgggcatttattcaaaacgatatgaccgaatccaagatataccgcgaggagctgtcgtttctgttccggataaagcgttcgattttggcagggcgcttacagtgctccaggaagcgggtttgctaacgctgaaaaacggatttaacggaacaggttcagttgatatgattaaagataatccgagacacctgaaattaaaagctgtccggcaacaggatgcagtgagcggtgccgacgtgtttgtcatgaaaccatcagaagcaaaaaaagcgggcctgaacccgaaaaagcatacgctaaagagcggcggactcatgtctgaggaagagatgaatttgattgttgtcagagcggaggatcaagatcgggaagcgctgcaaaccattcttgagctttatcaagcagatgatacagcggcatttatagaaaaagaatatcagagagatcttgtcccggcttttctgcctttgaaacgtctttcagattggaagaatgaattcgaacattgaattcattcttttttttctgaaaaacacactctgttccgtcccgtttctttcgctttgtaaagcatttgatcggcaagaatgggcaaggatcctggctgttccgtattattggggtaatgagcggcccctagtgatatcgtaactgaaagctcttcgccgtttgttaatacaatcggtgcatcacttacagtgctcctgatccgttcagcgatccgggctgctttatcaagagaacagttcggcaggagaacggcaaattcttcaccgccgatccgagcggcaggatcagtatttcggatgctctgcttcagacgtaaccccagctctttgagcacctgatctccttcatgatggccatattggtcattgatggtcttaaaatgatcgatatccatataaatcagtgcaaattgaaaatgcggggtatcggccgcctgctgatacagagcttttgtggtttcttcaaactttcttcggttatacacgcctgttaaaaagtcaaagtgcgcctgaaacttatattgtttaaaaagaagatgtgcatttgtttcatgatcaataatatataaactgagcatgccgcccgctattgatatgatccaaaaatacaaatgaagttcgtatgaatgtaaatctataagaaaataaaaggaaaaggagatcaagctatttgtgattattaaaagatagaaagcatgttttagttgaactttttttcttctagaaacaatgagtgacgggatggcagcgatacaaatgataataaccgagtatagtgcagatgtgttcattgtaatcagcaagcggcctgcagtgatcatggccagggccgttgccgttgaaacccagcctccataaagagcggcaatcataatagggatatttcgaagatcaataattgaatgctgataggtaaatccaaaaaccatcagaataaccccgagcaaaccgcaggccagtcctttaacagcttgaaaggatatgctgtcttttttatgtactagcctttctttaaacaggtgggtgaagagataattaaatgtgattaaaatggtcaaatttacaaacagttctttcagcaaatattatcacccttatataaggtactaaagatggaagggaaagaaaagaaaaaaaaaggcattatataaggtttttttacttgaattgataagttaaaataattctcacttgacccatcggaattagtgtaatatagtaaatgagaaaatttgaagggagagtttacctgctttggagactttactggttgtattacatgtatttattttatttttacttatcttagggctctttgttatgcagaaaaaacatgtttccttctctaaacgtgtatttactgcgctggggctgggaattgtattcggatttgcgcttcagctgatttacggcccgacttcaaatatagtcattcaaacagccgactggtttaatattgccgggggcggatatgtcaaattgcttcagatggttgtcatgccgctcgtctttatttcgattctcggcgcatttacaaagctgaagctgacaaaaaatcttgggaaaatcagcggtttgattatcgggattttagtagcaacaacagccgttgctgcagctgtcggtatcgcgtccgcgctttcatttgatctgcaggcgattcaggttgaccaaggaagtacagagctttcacgggggcaggagcttcagcagaaatcagaggatatgacagcgaaaacgctgccgcagcagattgttgaactgctgcctggaaacccgtttttagatttcacgggagctagaccgacttcaacaatcgctgtcgttatttttgccgctttccttggagtggcattcctcggcgtcaaacacaaacagccggaacaggcagaaacatttaaaaaactggttgatgccgtttatgccattgtcatgcgtgttgtcacactcattttgagactgacgccttatggggtgctggcaatcatgacaaaaacaattgccacgagtgatcttgacagcattttaaaactgggcatgttcgtgattgcttcatatgccgcgttaatcactatgtttatcattcatttgctgctgctgacgttcagcggcttgaatccgctgatttatttgaaaaaagcggtgcctgtacttgtatttgcatttacgtcaaggtctagcgcgggtgctttaccgctgaatattaaaacacagagaagcatgggtgtaccagaagggatcgcaaactttgccggttcgttcggtctttcgatcggccaaaatggatgtgccggcatttatcctgcgatgctggcgatgatgattgctccgactgtcggccaaaatccatttgacccggtgtttattatcactgttatcgcagtcgttgccatcagctccttcggggttgccggagtcggcggcggagcgacattcgcggcgcttcttgttttatcatcattaaacatgcctgtcgcgctcgccggtttgttaatctcaattgaaccgttaatcgacatggggcgtactgctttgaatgtcagcggaagcatgacatccggtcttattacaagtaaggtcacaaaagaaattgatcaaggggcatttcatgatcaatccagagtgattgaagctgaagaagcgtaacatatgaaaacgtgtaatccaagaggattacacgtttttttaacggccgggttctaaatcctccagcatttccatcatcgtgttgtcgtccatgacattcattgcgctttgttcaaaatgaatgggttcagcataatgcggctgtctttttttcgcggctgactcagtttgcctagtttgagactgtgtatgctgatgcagtggttgctgctgtccagcgtgctggtgctgacggccattttgccgctggctttgatgctgcgaacggtcctggttatcaccgctgcttccgctgcttccgctaaatgcttgtttgaccatgtttcctacattagaagcatcaaacgtgttattttctgaatttcgtctgttcatttgtcctgtgataaacccgctaattctttggcggatctgaggtgataatgcagcaataagcatagttgatcctatgatcaatgctgcggggctgattcctcttcgctggttgaacaacatgatccctcctttgcagtgtattcatattttccccctcgttagacaaattaaccgttatatttcccgggaaagcatttcctccagatttgcatgcataattaaagccagttagaaaaacctataagtaaagtgataaaggaggaattcacatgtttggaaaaaaacaagtccttgcgtctgtgcttcttatccctttgcttatgactggctgcggtgtggccgaccaaggtgagggcagacgtgataataatgatgtaagaaacgtaaattatcgaaatccggccaatgacgatatgcggaatgtaaacaatcgggataacgttgacaacaatgttaatgataatgtcaataacaatcgtgtaaatgacgataataacaacgaccgaaaacttgaggttgctgatgaagcagctgataaagtaacagacctaaaagaagtaaagcatgccgatatcattgtggctggaaatcaagcctacgttgcagtcgttttaaccaatggaaataaaggtgcagtagaaaacaatctgaagaaaaaaatagccaaaaaggtaagatctactgacaaaaacattgataatgtttacgtttcagctaatcctgattttgtagagcgtatgcaaggatatggaaaacgtattcaaaatggtgacccaatcgccggattatttgatgaatttacacaaactgtacagcgcgtattccctaacgctgaataaataaaaaaagccgcacaatttgtgcggctttttctttgcgttaatgacacactgcgaactcaggctgcatagagtaaaaataaaaaggtacaagacggaccggctcagggagggagacgtttgcgggatggcataggaaagcgtgcggcatccgctctattcctgtgcggagtccttgtgatgctggctgtaagctcagccatcgtatcaagcgcgatgtatatcctgtcttttccaggtcaggcatctggaataacaaaagaacaagtgacgaagcacatgaagaaagagtcattcaaacaggccgatatttattacacttctaaggaaaagtccttactgccattgacgaaagaaacgcttgaatatgcggtcagtattaatcagattatgattggatattcgaatcaaaagcctattgacattattttttttcctaatgaaaaacagatggaggcttactccggtttattggatgtagttggtttttattctgagcgggagcagttgattggactgttgcctgaagagaaaaagaaactgttagaaggggacgaggtagcggtttatttgtaccagagattgttgattcatgaatactcgcaccatgcgtttcatcagaaattgaaggagcttgagacggatcccgatgagtttccgttatggtttcatgaagggttaagcgagtggattgcgaactatgaattgctcatagatccgatcacgttttctgtcgtgccctttgaccgtttgcagactgatcgagactggcaggaagccagagccgaatatgacactgatgtctatttgcaaagcttttatatgatcgatgagctgaccggcaaatacgggaaagacattatttcagaaatgattaaggaaacagcaaaaaaaggggactttgaaaaagggtttaaatcagcaacaaaggaaagtcttgatcattttgaaaaggattttaagaagaaatttgaaaaaaacagtgcggcattggatagtatctatccaatgcctttgttattagtgaagtccttgctgacccattccgccttgtgtcggaggcatttgtccttgggcaggggcgaatgaatttctcagctgttccatatcctgcgcatcaagctgaggaacctggtaatagccgtgtttgttttggtatagaaaaatttcaaatgccatttcaacatactcctgaatttgcgcagacagtacgcgtcttacggccggatttgtcatttccagagacgccatcgtcagcatagaagcttgtgctttaatcgcgcaaagcatttgtcggctgatgatgctgtcatcaatatcattcatggattgaacaggttttttaggctgtgacggctgcatgccgtaaacagcctggttgtcctccttcatcatataagttgctgttttttgtgaaggttcgcttcctgttttgaagcattctgcagttatattgtattgagatgtaatgaattgatgttgacgatcaaggatgtttagtaattcttgatccttacagaattgtctcagcatcatatactgatcaagcacagtaagtgttccggaaagcacctcatgcatatcaaacatttcatgtccgccgtggtttttatgcggtttgccaggaatacctttgttcatttgggattgctgctgctgattgaactgatccaaaccgaattcctccttttttttcagatcaactgtattttgtgtcagtctgccgtgtattatgcagaagcctgaaaggaattatatgctgtctgtcgaaatgataagcagacaaaatcgttgtcattatgtgtatattaagggaggaaatatgatgaggcgtattctgcatattgtgttgatcacggcattgatgttcttaaatgtaatgtacacgttcgaagctgtaaaggcagctgaaccgcaacagcctatatcgattgagaaggcaatacagcaaaaagaaggacaggcgcttgtcgaaggatatgcagtcggccaggctgtttccccgcagcattataagctgacaagccctttctcaaatgattataatgtcgcgctggcagaccgtaaaaatgagacatcgcccgaacacatccttcctgtgcaaatcccctccgccttcagaagccaatttgggctgcaaaccaatccgcttcttcttgggaaaaagataacggttcaaggaaagcttgaaaattactttaacacgacaggacttaaaaacgttcagtcgatgaacgtaaccgatgacacgaaaactccgccggctgaacagccagtgaccataaatgaagcacggggaaggctgaatgaagaagtaacgataaaagggatcattacagctgatcaaaacgcaatcggaggcgggaagctgtcgacctttttgcaagatgaaaccggaggcattaacatttattcgccatcccctgaacaatttcccgaattaaaagagggtatggatgtcacggtgacagggaaaatcacgtcttaccaggggctgaaagaaatcgttccaagctcatcaggcatcaaaatcaaccagtcaaatcaatccctccccgccccaaacacttaacaatcaatgaacttattaacggcagcctaggtgatcagtatgaaggacgccttgtgaaactaactgcttttgtttccttaattccaagttctcctgccggcggcggttacaatgtaacaatgattgatgacgaccatcatgcaatgacgctccgggttatgaatgaaacaggggtgataaacgagcttgatgagggcaaatggtatgaatttaccggtgtgttaagcagataccaaacctttcaactgcttccgcgaaaatcggctgacctgaagctgcttgaagagcagcccgcacctccgtctgcggagggagaatatgaagggattgttgaccgggttgttgacggcgataccattcatctcaaatctccggtgcttggaacgacaaaaatccggtttgtaaatgtagatacacctgaaacatatcacacaccaaaaaatgacgcagatgaaaatcaattaagatttggcaaaaaagcatctgactatctaaaaacggttctgtccccaggtgataaaattactgtcaaggtcgggagtgaagccaaggacagctatggcagactgctcggacaagtcataaccgaatcaggatcaaacgtgaacttagagcttgtaaaaaacggctatgctccgacgtattttatttggccggttgacaatgaagaggattatcagcaatttcaggccgcagtagccgctgcaaaaaaagatcaaaaaggaatttggaatgaaaacgatcccctcatggaaatgccgtttgaattcagagccagagagcaagggaaaggcctgacaagatatgtggggactcgtcgaataaaacatatgtgcagccagctgactggaagaagatagctgtggaaaacagaattttcttcgcttcagcaagtgaagcggagagcgcgggatataaaaaaaggcaaacggcacctcaagaacatgtgccgcttagaattctcagcatgaatgatttgcatggcaaaatcgatcagcaatacgagcttgatcttgatggaaatggaattgcagacggcacgtttggacgcatggattatgccgccgcatatttaaaagaaaaaaaggctgaaaagaaaaactcgctgattgtgcacgcgggagatatgatcggcggaagttctccagtttcctctcttcttcaggatgaaccgactgtagaactgatggaggacatcggatttgatgtcggaaccgtgggaaaccacgaatttgatgaaggcacggatgaactgctgaggatcttaaacggcggtgatcatccgaaaggcacaagcggatataatggacagaactttccccttgtatgtgccaattgtaaaatgaaatcaactggagagccctttttgccggcttatgacatcataaatgtggagggcgtacccgttgcttttatcggggttgtcacacagtcggcagctggcatggttatgcctgaaggaataaaaaatatcgagtttacagatgaagcaacagcggtgaataaggcggccaaagagctgaggaaaaaaggcgtgaaggctatcgcggttctcgcacatatgtcagctgaacaaaacggcaacgccattaccggtgagtctgctgatcttgcaaacaaaacagattctgaaattgacgtgatttttgccgcgcataatcatcaggttgttaacggtgaagtgaatggaaaactgattgttcaagcgtttgaatatggaaaagcgataggtgtcgttgatgtagagatcgataaaacgacaaaagacattgtcaaaaagtccgcggaaatcgtatatgttgatcaaagtaaaatcgaaccggatgtcagcgcgtcagccattttaaagaaatacgaaacaattgcggaaccgattatcagcgaggtagtcggcgaagccgctgttgatatgggaggggggtattcaaatgacggcgatacacctcttggaaacctgattgcggatggtatgagagctgccatgaaaacggattttgctcttatgaatggcggcggcatacgtgaagcgctgaagaagggcccgattacgtggggagatctttacaatattcagccgtttggaaatgtgttaacgaagcttgagattaaaggaaaagatttaagagagattatcaatgctcaaatctcgccggtttttgggcctgactacagcatcagcgggtttacgtatacgtgggataaagaaaccggaaaagcagttgatatgaaaatggcagatggcaccgagatccagcccgatgccacatatacattgaccgtcaacaactttatggcgacggcgacaggagccaaatatcagccaatcggactgctgggaaaaaatccggtgacagggcctgaggatttggaagcgacagttgagtacgtgaagagttttgatgagccaattgcgtatacaaaagagggaagaattaagctcgctgaagccagtgatattgaagaccctgtaacagaagacccgattacggaagagcctggagatgatccggggacggagcatccaatgaaagaggttccagagcctgatgtggatttgcctgatataaaagaaactccgggaacagcaccggttcatcagcttccgccttcagccatttcgagattcaatgaaataccaatcaacaacacaaaaaccgctgatactgctaatagcatcagcacattgccgttacaaaccgagactgcggaaagcgggtctgatcatcagcttccggatacgtcagcgggctactataactttatggtaatcggtgcggcggtgacattgtcaggaacttatctatatgtcagaagaaaaaggagcgcctccagaacgtgaaaaaagttattccactattcatcattgctgccggcctagtgatcgcaggctatggaggctttaaattaatcgatacgaatatgaaaacggaacagacattaaaagaagcaaaactggcggctgaaaagccacaggaacttttggggacgaaaaatagcacagatcaagcaaagaacaaagcatcatttaagcctgagaccggccaagcgagcggcattttggaaataccgaaaatcaatgcagagcttccgatcgtggagggcaccgatgctgatgatttagaaaaaggtgtcgggcattacaaggacagctattatcctgatgaaaacggacaaattgtgctgtcggggcatcgggataccgtgtttcgccggacgggagagctggaaaagggggatcggctccgcattctcctgtcatatggagaattcacatatgaaattgtaaatacaaaaattgtcgataaggatgacacatctattatcacgctccagcatgaaaaggaagagctgattctgacgacctgctatccgttttcatacgtcggaaatgccccgaaacgctatattatatatggaaaacgagtgacttaaaaagccgaggcagtgcctgcggcttttcttcatgaaaaatatgtgcggcaaaggtttttcatatcagcagggaaaggggcttcagcaactatgagctcgtctgttatcgggtgaaccgcttgtactttattggcgtgcagtgcctgcctgtttagcagcttgctcccgcctccgtaaagcgagtctcctgtcaacggatggccgaggctcgccagatgaacacggatttggtgtgttctgcctgtttccagctctaattcaacgagcgacagccgttctttcgcattgctggccattaccttgaaatgagtgacggcagtttgcccgcctggtgaaacccggcgtcttgtcgggtgtgaccggtctctgccgattggtgaattaattgtcccttttttcgtccgtagcttaccttcagcgatggcggtatacgtacgcttcagcgtctttttctctaactgctggtctaagatggcgtgtgccaaacgatgcttggcaaaaacgatagcgccagatgtatcctgatcaagacgatggacgtggcgcaccttacatgtttcgccatttatctgataatgataagcgatcaaattagccagtgtgccggtttgcccatcctcattcggatgcgtcgcgatgccagcgggtttattgacgatgagcatatgattgtcctcatataaaatatcaagctcgccatactccggaatgaccgaagatgcttcactttcctgaagatcaatgaacacacggtctcccttttttacaatcatattgtttaagacggattcgtgattgacctttatctgttgatgggacatccagtcttgtatcactggtttagaagctttgagcgctgttttgagtacggaaaacagccattggccgtcctgtttttcattgatgaggatctcaagccctctgcctttttggttcatgttaaatggctccttttcgaagcggaaggctgctgtttctcataggaaacacttaccttagctttcgcgtttttttctgtgctattcttgagtaagacttaggatattcgatggcaagaaaggtgattgacgtgagaattgtgaacgcagcaactgcagaacaggagagctttatcaaggagctgtctatggagctgatccatgatgtatttcctctttatttctccgaactggacattcagcgctttaaaaagaaaggcgttctgtctttaaataaccattattaccaaggaacattaaaagaagcatttcaaattatggcttgtcttcaaatgatacatattatcctgaccaagccttcgccgcactctgatttgagtgatcaggcgatttttgaaaaaaacagcaagatgctgaatgattttgggatttattttccgtttgctttttctgactttcaaaagaagactaacaaagcctttttcggtcaaagaaggctgatataatcatgcggcaagggcttttctatttttagaaaagctcttttttgtatcagagaaatcatatcataaaacctttcctctaactccctttttaaacggctcgtgtctgaacatactaatgattgaaaggggtgctgacaatgagttcagttaaagatacaatgacaacgcaggtggcaaccgtttctccgaatcaaacgattcaggaagcggcttctctaatgaaacagcataacgtcggggcgatccccgttgtagagcaaggtgttttaaaaggaatgctgactgaccgtgacattgcattaagaactacagctcagggccgtgatggccagacacccgtttcagaagtgatgtcaacagaactcgtatcaggaaaccctaatatgagtctggaagacgcgtcgcagctgatggcccagcaccaaatccgccgccttcctattgtagatcaaaacaatctagtcgggatcgttgcgcttggagacctggcagtcaatcagatgtcgaacgagtctgcgggatcagcgctgacaaacatttctcaccaaaacattcattaataagaaagagcttgcagtgtgcaggctctttcttcacataaaaccttactttttgaaagcagacttgtttcggggtatagtgagtgtatacatatgtctcaattcgtactaaaggagttgtacccagtgattaaagcgttaatttttgattttgacgggcttattctagatacagaaacacacgaatatgaagttcttcaggaaatatttgaagagcacggctcagtgctgccgctatctgtctgggggaaggtcatcggaactgcagcgggtttccggccttttgactatttagaagagcagatcgggaaaaagctgaaccatgaagagctcacacaattgagaagagagcggtttgccaaacgcatggaatcagaaaaagcgagacctggtgtcgaagcgtatttgaatgcggcaaaggatttaggcttaaaaataggccttgcctccagctctgattataaatgggtgtccggccatttgaagcaaatcggcctgtttgatgattttgaagttattcaaacggctgatgatgtggaagaggtgaagccgaatcctgaactctatttattggcggcaaagaacctgggggtatcgccagcggaatgtctcgcgtttgaggattctgtcaatggttcgattgctgcgaaacgtgcaggcatgaagtgtgtcattgtcccgaataaagtaacgggcaccttgatgtttgaagactatgatcacaggcttgaatcaatggcggagatggagctcgccctattgcttgatcatctgaactcacaaaactagaaaggagcgagtaggttgtctgagaaattagatttgacccggtttgaaaagaaaatggttatccgcaatatcgaagagaaagacatcgacaagattatcgatcttcaaaaggactgctttccaggaatggagccttggaagcgggagcatttaatcagccatttggagcattttccagaagggcagttttgtgcagaattcgaaggtgaaattatcggttcgtgctcaagtctcctgattaactttgatgaatatgatgaccgtcatacatggcaggacattacagatgacggttatatcaccaaccataatcctgacggcttgaatatgtatggaattgaagtcatggtggacccgaagtacagacgaatgaagattggccaccgtttgtacgaggcgagaaaggacttagccagacgcttaaacctgaaaagcatcatcataggcggacggattccaaactatcacaaatatgcagaggaaatgacagcgagagagtatgttgaacaggtgacacgccaccaaatttacgatccggttctttcttttcagctgatgaacggctttacccttatgcgaattaacccgaactatctcccggatgatacagcttcgatcaagtatgcgacgctgatggaatggaataatgtggattatctaccgcagcagacaaaacgctattataaatcggcgttccctgttagaatttgtgtgattcaatacgaaatgaagaaaatttattcctttgaggaatttgcgaatcaagtagaatactatgtcgatgttgcttccgacgcaagatctgattttgcggtgttcccggaaattttcacaacccagctgatgtccttccttgaggaacggtcaccgagcttggcggtgcagagaattactgagtatacagaagattacatcagcctgtttactgacttggctgtgaagtataacgtcaacattatcggcggatctcatttcgtcgaagaggaaggcaagatctataatatcgcttacctgttcagacgggacggaacgatcgagaagcaatacaaactccatattacgccgaatgaacgcaaatggtgggggatcagcgcaggagaccaagttcgcgtgtttgatacggactgcgggaaaatcgcgatccagatctgttatgacattgaatttcctgagcttgcccggattgcggctgataaaggagccaaaatcatctttacgccattttgtacagaagaccgtcaaggctatctacgtgtcagatactgttcgcaggctagagcggttgaaaatcaaatttatacggttatctctggaacggtcggaaaccttccgcaaacggaaaacatggatatccaatacgcccagtcaggcatctttgccccgtctgattttgaattcgctcgtgacggcattgtcggcgaaacaaacccgaatattgaaatggtcgtcatcggcgatgttgacctggaaattctcagaagacagcgccaaaacggtacagtgcgccagctaaaagacagacggcgtgatatttatcatattcaatataaaaaataattcccaaaaaacccgcctgaattggcgggttttttaaaacaaaagcggaattgtttaggtgctatctttaaaataaaagtaggtataatggagtttctgtattttcgccatttcctatatcatacagaaatcggctaggcttccattgctattgcaatggctgtccaagttgtttcgagtgcgacctttatcagtacgatgctgagcattgccactttgcctgttttgctttggaagctgcatcctctttcttcttgagaaagaggatattttattatttacgcggtttattgactctgacccggtctggctttatattgaaggcagggaaatcatcaccaagacatcacataaagagaaggtctgtttcaattgaattggcattatagagaacgctaatgaaatggagatgatggggatggaaaacattcagcaaaataagggattaaagcaaaaagatgagcaatttgtgtggcatgccatgaagggagtgcatcaagcggacagcctgatagcccagaaggccgagggggcctgggtaaccgacacagacggacgccgctatttggatgcgatgtccggtttgtggtgcgtcaacattggttacggcagaaaggagcttgcggaggctgcctatgagcaactaaaggagctgccttactacccgttaacgcaaagtcacgcacccgcaattcaactggcggaaaagctgaatgaatggcttggcggcgattatgttatttttttttccaacagcggatcggaagcaaacgaaactgcttttaaaattgcccgccagtaccatctgcaaaacggcgaccacagccgttataaattcatctcaagatatcgggcataccacggcaatacattgggagcgctctcagctaccggacaggcgcagcggaaatataaatacgagcctttgagccaagggttcctgcatgcagctccgccagatatataccggaatcctgatgatgcagacacgcttgaaagcgcaaatgaaatcgaccgcatcatgacatgggaattaagcgaaacgattgccggggtcattatggagcccatcattacaggcggaggcatcctaatgccgccggacggatatatgaagaaggtggaggacatttgccggcgccacggagcccttttgatttgcgatgaagtgatctgcgggtttggacggacaggtgagccgttcgggtttatgcactacggtgtgaagcctgatatcattacgatggcaaagggaatcacaagcgcgtatctgccattgtcagcgactgctgtgaaacgggacattttcgaagcgtatcagggggaagctccttatgaccgtttccgccacgtgaacacgttcggcggaagcccggctgcctgtgctttggcgttgaaaaacctgcaaattatggaggacgaacagctgattcagcgatcccgtgatcttggagcaaagcttttaggtgagcttcaagctctgagagaacacccggcagtcggggatgttagaggaaaagggctgctgatcggaatcgaactcgtcaaagacaaattgactaaagagccggctgatgccgccaaagtaaaccaagtggttgcggcgtgcaaagaaaaagggctgatcatcggcaaaaacggcgatacagtcgccggctacaacaatgtcatccagcttgcgccgccattttgcctgacagaagaggacctttcctttatcgtgaaaacggtgaaagaaagctttcaaacgatataatataaaagtgaattattaaaggagcacatgatgagttttcacaaccagccgatcttaccggctattcgcaatatgaagcaatttgatgagtttttgaacagttcattctcttacggtgttattcttgatattcatctcggccagctgaagggcgtgatcaaagaagcgcaaaagcacggaaagaacatgatggtgcacgtcgatctcattcaagggattaagcatgacgaatacggtgcggaatttatatgtcaggatatcaagcccgctgggattatttccacaagatcgaatgtgattgccaaagcgaagcagaagaaaatttatgccattcagcgcctgtttttgcttgatacaagcgcgatggagaaaagcatggagtttatcggcaagcataagcctgacttcatcgaagtgcttcccggcatcgttccgtcactcattcaggaaataaaagagaaaacagggattcccatctttgccgggggtttcatccgtacggaagaggatgtagagcaggcattgaaagcgggggctgtagctgtcacaacatctaataccaaattgtggaaaaaatatgaaaactttttgacggaaagtgattgacaccgctttcatgcactgatacaattgcactaggttaatacattgtgatggagaactcggagaccacagcagctctttacggcaaatgtttatgcacccgtaaagcggtttgttgtggtttttttattctcttcttctctatcatgctttttaatcgtgactttaggaggaatgtgctatgacagcattttggggagaagtcatcggtacgatgctgcttatcatttttggtgcaggtgtttgtgcaggtgtcaatttaaagaaatcgctttcattccagtctggctggattgttgttgtatttggatggggattgggtgttgccatggcggcatacgcggttggcggcatcagcggtgcccatttgaatccggcgctaacgatagcgcttgcatttgtaggagattttccttggaaagaggttccggtttatattgcggcgcaaatgatcggagcgatcatcggtgcggtgattatttatctgcattacctcccgcactggaagtcaacggatgatcccgctgccaagctgggtgttttctcaacagggcccagcattccgcatacatttgcaaacgttttaagcgaagtgattgggacatttgtccttgtacttggaatcttggccattggggcaaatcaatttacagaaggacttaatcctttaatcgtcggtttcctcattgtagcaatcggtatttctctgggaggaaccaccggctatgctatcaatcctgcacgtgacttaggtccgcggatagcccacgcttttcttccgattccggggaagggctcatcaaactggaaatacgcatgggttccggtagtcggcccgattttaggcggatcattcggcggcgtattttacaacgctgcatttaaagggcacatcacaagcagcttctggattgtaagcgttatattggttgtggtattgttaggactctatgtttatacgaaatcacattctgctaaaacattatcaaattcaaaatatatttaatcaaaggggagacatcttatggaaacgtacattttatccttagatcaggggacgacaagttcaagagcgattctgtttaataaagaaggcaaaatcgttcactctgctcaaaaggaatttacacaatacttcccgcatcctggctgggttgagcataatgccaatgaaatttggggctctgtcctcgcggttatcgcctcagtcatctctgaatcaggaatcagcgcttctcaaattgccggcatcggcatcacgaaccagcgcgagacgacggttgtgtgggataaagatacaggaagtcctgtctataatgcaatcgtttggcagtccagacagacgtccggcatttgtgaggaacttcgtgaaaaaggatataatgataaattcagagaaaaaactgggcttttaatcgatccatacttctccggcacgaaggtgaagtggattttagacaatgtggaaggcgcaagagaaaaagcggaaaaaggcgagctgctgtttggaacgattgatacgtggctcatttggaaaatgtcaggcggaaaagcgcatgtgaccgattactccaatgcctcaagaacactgatgtttaatatttacgatttaaaatgggacgatgaactgctcgacattctaggcgtaccgaaatccatgctccctgaagtgaagccgtcctctcatgtgtatgcggagactgttgattatcacttcttcggaaaaaatatcccgattgctggagcggcaggcgaccagcagtccgcattgttcggccaggcatgctttgaagaaggcatggggaaaaacacatacggcacaggatgtttcatgctgatgaataccggggaaaaagcaattaagtccgaacatgggcttttgacaacaatcgcttggggcattgacggaaaagtgaactatgcgttagaaggaagcatttttgtcgcaggctctgccatccagtggcttagagacggattgagaatgttccaggactcttcgcttagcgaatcttatgcagagaaagtggattcaactgacggcgtatatgtcgttccggcctttgtcggactgggaacgccttactgggacagcgatgtgcgcggttcggttttcggcctgacaagagggacaacaaaagagcactttatccgtgcgacactggagtcattggcttatcagaccaaagatgtgcttgacgcaatggaagcagattcaaacatttcattaaagacgcttcgtgtagacggaggagctgtgaaaaacaatttcctaatgcagttccaaggagacctgttgaatgttcctgtggagcgcccggaaattaatgaaacgactgcacttggcgcggcttatttggcgggtatcgctgtgggattctggaaggaccgttctgaaatcgcgaaccagtggaatctggataaacggtttgagcctgaattagaagaagaaaaacgaaatgagctgtataaaggctggcaaaaagccgtgaaagcagctatggcttttaaataaagtaatactatggtataatggttacaagttaataagaacggtcctgagatgaggagagaccacagcaccaaagtgtaagcatgcactttggctgttgtggtctctttttctatttaccgtgacaacaaggaggagacgtaatgatgaaacatcaattttcaagtcttgaaagagatcgcatgctgacagacatgacgaaaaaaacatatgacctatttattatcggaggaggaattacaggagccggaacagctcttgacgcggcatcaaggggaatgaaggtcgcactaagcgaaatgcaggactttgcggcgggaacatcaagccgatcaacgaagctggtacatggcggcttgcgctatttaaaacaatttgaagtgaaaatggtcgctgaggtaggaaaagagcgggcgattgtgtatgaaaacggcccgcatgtcactacaccggaatggatgctgcttccgtttcataaaggcggcacattcggttcatttacaacatcaatcgggttaagggtttatgacttccttgcaggtgtgaaaaagtcagaacgaagaagcatgctttcagcaaaagaaacgctgcaaaaagaacctttggtaaaaaaagacggcttaaaaggcggcgggtactatgtggaataccgcactgacgatgcgagactgaccatcgaagtcatgaaggaagcggtgaaattcggggcagagcctgtgaattactccaaagtgaaggagcttctttacgaaaaaggcaaagccgtcggcgtattaattgaagatgtgctgacaaagaaagaatataaagtgtatgcgaaaaaaattgtcaatgctacaggcccttgggtcgatcagctcagagaaaaagaccattcgaaaaacggaaagcacttgcagcatacaaaaggcattcaccttgtatttgaccagtctgtctttccgctgaaacaggctgtatatttcgatacacctgatggccggatggtatttgcgattcctcgtgaaggcaaaacatacgtgggaacaacagacactgtttacaaagaggcgctggagcatccgcggatgacaacggaggatcgtgattatgtcatcaaatcaatcaattacatgttcccggaactgaatatcactgcgaatgacatcgaatccagctgggcggggctgcgtccgctgattcatgaagaaggcaaagatccttctgaaatttcacggaaagacgagatttggacatctgactcaggcctgatcaccattgccggcggaaaactgactggatacagaaaaatggcggagcacatcgttgatcttgtccgtgatcgcttaaaagaagagggcgaaaaggattttggaccatgtaaaacgaaaaacatgccaatctctggcgggcacgtcggcggttcgaaaaatcttatgtccttcgttaccgcgaaaacaaaagaaggaattgcagccggtttatcagaaaaagacgcaaaacagctggcgatcagatacggctctaacgtagatcgcgtctttgaccgggtagaagcgctgaaagatgaggccgcgaaacgcaacattccggttcatattcttgctgaggcagaatacagtatagaagaagagatgactgcaactcctgctgacttctttgtccgcagaacgggacgtttattttttgatatcaattgggtaagaacatataaagatgccgttattgattttatgagcgagcgattccaatgggatgagcaggcgaaaaacaaacatacagaaaacctcaacaagcttttacacgatgcggtcgtaccgcttgagcaataaatcataacgggctgtctgcagcccgttatttctttttacgtggaaagggccagatctcaggttatcaagtgacagaggcacccgcttcatataaaataatggcataagctgatacataggaggacgaatatgacttggagaaagagctatgaacgctggaaacagacagaacatttagatccggaattaaaagagcgccttattgaattagagggagatgaacaggcccttgaggactgtttctataaagaccttgaattcggtaccggcggaatgcgcggggaaatcggcgccgggacaaatcggatgaatatttacactgtgcgcaaagcatcggccgggtttgcggcatacatctcgaagcaaggtgaggaagcgaaaaaacggggcgttgtcattgcttatgattcccgccataaatctccggagttcgcgatggaagcggcaaaaacacttgcgacacaaggcatccaaacatacgtgtttgatgagcttcgcccgacgccagagctgtcattcgctgtcagacagctgaacgcttatgggggaattgtagtaacggcaagccataacccgcctgaatataacggctacaaagtatacggggatgatggcggccagctgcctccaaaggaagcggacatcgtcattgagcaggtaaacgcgattgaaaatgagctgacgatcacagtggacgaagaaaataagttaaaagaaaaaggcttaatcaaaatcatcggtgaagatattgataaagtttatacagaaaaactgacgtccatttctgtacatcctgaattatcggaagaagtagatgtaaaggttgttttcacaccgctgcatggaactgcaaataaaccggtcagacgcggacttgaagcactcggctacaaaaatgtaacggttgtcaaagaacaggaactgccggattcaaacttctccactgttacatcgccaaacccggaagagcatgcggcattcgaatatgccattaagcttggggaggagcagaatgcagatattctcatcgcgacagatcctgatgctgaccgcctcggcatcgcggtgaaaaacgatcaaggcaaatatacagtgctgacaggaaaccaaaccggagcgctgctgcttcattacctgctttctgaaaagaaaaaacaaggcatcctgcctgataacggtgttgttctcaaaacgatcgtcacaagcgaaatcggccgtgctgtagcttcttcattcggccttgatacgattgatacgctgacaggctttaagtttatcggtgaaaagattaaggaatacgaggcatcaggccagtataccttccaattcggttatgaagagagctacggttatttaatcggggattttgcccgcgataaggacgccattcaggctgcgcttttggcagttgaagtttgcgcgttctataaaaaacagggaatgtctttgtatgaggcgctcatcaatctctttaacgagtatggtttttatcgtgaagggctgaaatccctgacgctgaaaggcaaacaaggagcagagcaaattgaagcgattcttgcttccttcagacaaaatccgccgcagaaaatggcggacaaacaggttgtcacagcagaagattacgcagtaagcaaacggacgcttctgactgaaagcaaagaagaagccatcgacttgccaaaatcaaatgtattgaaatacttcctggaagacgggtcttggttctgtcttcgtccttcaggaactgagccgaaggtgaaattttatttcgccgtaaaagggtcatctttggaagacagtgaacagcgtcttgcctccctttctgaagatgtaatgaagacggtggatgaaattgttgagtcaacagcaaaataattcaagtatgagctgggtcattgtaaatgatccggctttttctttttctcatccaaaagtctgaaagaaaatcatcctacaagtgaagcaatgaaatacaaaaaactggtataatcttaaatacaagatcaatgccggagtgagaaacgtgagcaaaacgaggatggaaaaattaaaaacgctgaaaacgattgcggaaaccttaaatcaagggcacgatatcaaagcaacactggatgaggttttaaaagagttgctgagtctgacaaatcttcaatccggatggatttttctgatcgaagaagatggatcttatacgttagcggccgacgctaatctgcccccggctttaagccgcaaggaaaaagtgctgatgtgcgaaggggagtgttactgcctgacgaaattcaataacggagggcttagaaaggctgcaaatatcatgaactgcaaacgcatcgaatcagcagaaaacctgcattgttttgacacagaagggattacgcatcatgcaactgtgcctttagaagacggggacagaagattcggattgttaaatgtagcggcggccggaaaaaccatgtttgatgaggaagagctgcatttactcgagtctgtcgcctttcagatcggaacggcaatccagcgtatgaggctttctgaatatcaacaaaaaaatgctcttttaatggagcgtaaccgcctcgctcaggagcttcacgattcagtcaatcaaatgctgttttccgtcagtttaactgccaaagctgcgaagacactaacaaaagatgagaatttacagcagatgattgaattcatccaaaacctatcacaggacgcgctcgcagaaatgaaagcgttaatttggcagcttcgccccggaggattggaaaaagggctggctgaagccattaaaagctatggtgcactcattggattgaagatcatttttacacaaaaaggctgtcctgttctgactgatgagcatgagcatatgctatggcgtgtcgtacaggaagctttaaataactgcaaaaagcatgccggaacggatacggcgtatgttagtctgactgcttctttgtgccatgcggagctggatatcatcgatcatggggcaggatttcgctatgaagcgcataccggtctgccttcacttggcatcaagggtatgaaagaacgagcggaaaaagccggagctaagttttggattgagtcagcgcttggaactggaacaaagctgtccatcaggcttccgctaacaagccgaaaaggaggggcggtatgaaaattgtcattgctgatgatcatcatgttgtcagaaagggtctgcgttttttctttgccacccaggatgatattgaagttgtcggagaagctgcaactggaatagaagctctccgtgtcatcgaagagacaaagccggatcttgtgctaatggatctgtctatgcccgagatggacggcattcaagccattaaaaaagcaatacagcaatttccggagacgaatatcattgtgctgacgagctactctgatcaggagcacgtcatccccgcgcttcaggcaggcgcgaaggcgtatcaattaaaggatacggagcccgaggaattggtgaaaacactaagacaagtgcatgctggcgaatacaagctttctacagctattatgtcccatgtgctgacacatatgaaaaatcagcacgacccggaaaaagaaaaatactatcaattaacaagaagggaaaaagacgttctgactgaaatagcgaacgggaaaagcaataaagaaatcgcagcatccttgtttatttcagaaaaaacagtaaaaacccatgtatcgaatcttttagcaaaacttgaagtggccgatcgcacgcaagcagcgcttttcgcagtgaaatataacctgaatggagagatcttaaaatgaacatgttagtcataaatggcacgcctagaaaacatggcagaacaagaattgcagcttcctatattgcagctctgtatcacacggatttgattgatctaagcgagtttgtattgccggtttttaacggtgaagcggatcaatctgaactgttgaaggtacaggagcttaagcaacgcgttacgaaagcggatgcgattgtattattatcgcctgaatatcacagcggcatgagcggcgctttaaaaaatgccttggattttctaagcagcgaacaattcaaatataagcccgttgcattattggcagtagcgggaggcggaaaaggcggcatcaatgcgctgaacaatatgagaactgtgatgcggggtgtctacgccaatgtcattccgaagcagctggtgcttgatccggtgcatattgatgttgaaaatgctacagtggctgaaaacattaaggaaagcataaaagagcttgtcgaagaactcagcatgttcgcaaaagcaggaaatcccggcgtttaaacgccgggatttgtttatgtgagaagggctatttgatcttcataagtcagctctgtggcatgatcaatataacggagaagggaatacagcatcttttctaaaacggcgtaatcctgttcaaaatgatatgcatgcagaaaatgctcaattcgttttgataacaaatcgtcctctgtacgcaccattaaaattaataaattatcccattgagaacgatgggtgtaataaagcgctttatcgtaatcggcataatccatgaatcgcttctcctttcttgggtgagaagttcatgattagtttatgccgcatcctctgttattgacggggcaaaacttgccgtctgcgtaagtaaaggggtagcaatatgagggagacataaaatcaaaatgcctgaatgaagatatcgcttttggtaaacctatgagggaacatattctgggtacaggagactgaaaaaatgaaatccctgccgtataccatcgcgcttcttttttgcggattgattatcgtgtcaatggctgcaaaaggtcattcaacggacacagacgagtccgttcaaaagtgggaacagcttgcctggagcaaaattcaggatgaatataagggcgcttcattttctgattatgcttatatggggcgtacagaggtgaatgatcagcagacgaaagatgtctttcgggtgacagtcagacagaaagatgacactttttctgttcgggccgaagtctattttcatccggtgacaaatcatatgatcagcatcaacgtctttaggctctaataaaaaactgtacagccgttaaggccgcacagtttctgtttttagaaatatcgttttgcaccgagatagcgctgtttccagtaagagttgttcatattggaaatgacaactccggaatcgttggcatttatgaattccccgttgcctaggtaaattccgacgtgggaagggccggctttatatgttgtaaagaaaacaaaatctccgacagcaggctggctaactgatttcattgtgttccaatatcccgctgccgttaatctagatacggatgtgactttattcagtacatagtaaatgaatccgctgcagtcaaacccggacggtgtcgtgcctccccagcgatacggaaccccaagctgcgctttagcggccgaaatcattgtgttaatcttcgcactcgttgagctggtgttgtttgaagaaccggatgaagacgatgatgaagcttttccggaaatgaccagcttttggccaacctgcaagacatccgtttttaaattgtttttctcacgaatctgctgagctgttactttaaatttttgagcaatcacccacaaggaatcaccgcttttcactgtgtatgtagtcgtcgtgcctgagcttgcatttgacgaagaagacgacgatgatgaagagcctgaagatgctttacctgtcagcttcaatacttgtccaacgtacagcacatctgatttcagattgttgatatttcggatttgctgtacagacaggttatagttgtttgcgattttccaaagtgaatcaccgcttttaacggtatatttagttgttgctgaagtttggttcgatttggatgaagtgtctttagaagacgtatcagagccgcttgattttgttttcaacacctgattcacgtaaatggtgtctgattttaagttgttcaagaccttcaattcagcgatggacatattgactttgtttgcaattttccagagtgaatctccaagctgcaccttatatgttcccgtagaagatgaggaacttgaactcttattagaactgctttttgaactggagcttgaactcttattggaactgctttttgtactggaacttgaagaaacagtaccggacacctttaatttctgcccagcacgaattaaatcgctgcttagtccgtttaattttttcagttcctgcaccgtcattttaaactcatttgcgatcagccaaagtgaatctccgcttttcactgtgtaaacagaacttccgctcttcttggttgttgagcttgaagtagatgaagaagtgctggatttgctgcctggaatagtaagcgtctggccgatcgacagaacagtagtcgaaagatgattggcggatgtgagggccgccacacttgtgttataggtttgggccagtttccataaagaatctccgcttttgaccttaatcgttgctgcttcagctggtgtcactactaaagttgtgccgacaatcgcagatgctgtcagccctgctgctaatttctttttcatcttagctctcctttttcccccaatgattttgcatttgctgtttcttttttatatcggcacatttgtctcatcgttttgcctttttataaaaatagccaaattatcttaacaataagggggaaaaagggcataaaaaagaaggaatcttgatctattccttcatttttaaaagcttcatgatatcttctttgtttttgacgaggtcgcgcagtgtgtatttgtctaaaactgcgaggtaggccaaaagcgcttcattcagcacatgttttaagccgcaaaccggggaaataacacagagattcttattcgcatcaaaacattcaacaatattaaaatcgtcctccgtttttctgacaacctcaccgatgttgatgtcttcaggttccatgcctaatcgtatgccgccgccccgtccgcgtatcgtttctacgtagccgagctggccgagcctgtatatgactttcatgagatgattttttgaaatagaatacgtttcggcaatctgttttatatttgaaagttctccgggacgctctgcagccagaaaaatcaacactcttaatgaataatctgtataattggttaacttcataataagacctcagaataagacattttctatatcttatcataatcgattgaaaaatgaaaaaaaaggaattaaaaaaacatgcacccagctgggtgcatgttttttgcttacatgtcattcggcggattttggttttttcggtttttttcgatttctgtgttttgcattttgcgttcaaatgtagacagataacgtgatgcaaaatccttaccgccaaggccgaaggataaaccgaaagcgagtgcgaagccgctaagaacgatgatgaacgcggaattgacgattgtcgcagcgacaccaagctgatccagggccataaagaaagcaagtgcgataatcgtatatttagcaataggcgctaaagacttgaattcctggccttttatcatgcttgcgagcacttttctcaccaattctcctgcgtaaaggccgagtccgagaatgaatactgcgacaaggacattcggcagatacgcgatgatgccagtggcaatttctacgaggaagtgcagccgaacaatttgaagagcctcagctgtaaagagcagaatgacaatgatttgcgcaatcataccgacaacttgagacaaggacagctttgcaggcgttccggcttccatgcccattttccctaagacagaatcaaagcctgcgcgatggagcagtccggacaccatggatttcacccattttcctgcccagatacctgctaaaacaagcacgatggcaatcatgatgttcggaagcatgtttaaaatcgtattcagcatagagacagccggttttgaaatgccggagacatccagctgatcaagcgctgaaatgaccaccggaatcataatcagcacataagcgattgttccgatgactgctgaaaggcttgtatcttttaagtaaattgataaacccatacgtgccgcgaatctttccgtgccgatgcttgcaaggaaattcgtaatgatatcacgaacaaggcgggcaacaagccagccgattaatacgataagcgccgctgcaaataatttcggcagaaaagcgagcacgctttccatcatatttgtaaaaggacctgaaatgccgctgattttcaaagaagataagacccctggcagaaaaacaagcagcacgagataaaagacaatttgtgaagcggtattgacagcctggtgaatatcttttccttcagacaccaaattccacttgcgcagtttgtcactcgtgttcagcttcatcccgatttttttgacaaggaagctcaaaacagaggctgcagcccatcctaacagcagaatgagtccggctttcagcacgcttgggatcgcggctgcaatcgccgaaagcatactgacaaacggcgatgccactgttgtcaggtgcaaaatgttaaagaataaaataaagacgatgatcagtgcgataaaataaacgaccttgcttatgactttttccgaggaatagcgtgaaggctttttcccagcaaagagcttgtcgtcaatttttgttttgctgagtcctttgtataccgctttttcaatgattttagcaatagcccatccgattaataagacgagtaaagcaatgattacgtttggcagcttactgagataagaagaaagcacgtctgctacattcaattggtatcgctcctttttcgtagtatggtgtgtgtttacccactgatccaataagaaaacagatgaatgtgccgggggaattttttcttgcccgagtgagactatcatcttttgtctggcgggctcatacattatagataagtccaagtaggggggattcggttgaacgcggaggagaagaagggattacagcgggcaattgaggaaattaccgaaattgcaaaaggattcggccttgatttctacccgatgagatatgaaatctgcccggctgaaattatttatacatttggcgcgtacgggatgccgacaagattcagccactggagcttcggcaagcagtttcacaagatgaagctgcactatgatctagggttaagtaagatctatgagctggtcattaactcagatccatgctatgcttttttgctggacagcaactcactgatccaaaataaattgattgtcgcacacgttcttgcccattgcgatttcttcaaaaacaactgccgtttccaaaacacgaagcgcgatatggtggaaagcatggcggcaacagctgaacggataaaacactatgaacaggttcacgggataaaagaagtcgaatcttttttagatgcgatcctttcgattcaggagcatatcgatccgtcgttggtccgaccaaagctccaatggagtgtggatgatgaggaagaggagattgaagaggcagccacgccttacgatgatctatggtctttggatgaaaagaaaccgaaaaaacaagtgaaaaaatcgaaaaaaccgttcccgccgcggcctgaaaaagatatcctgctttttatcgaggagcattcccgggagctggagccatggcagcgtgatatattaacgatgatgagagaggaaatgctttatttctggcctcagctggaaaccaagattatgaatgagggctgggcttcctattggcaccagcgaattatacgtgagcttgatttaacctctgatgaagcgatcgagttcgccaagctgaatgcaggtgtcgttcagccgtccaaaacaggcattaatccttattatttagggctaaaaatatttgaagacattgaaaagaggtacaacaacccgacggaggaaatgaagaaaatgggcgtgcagcctgactccggccgggagaaaatgtttgaggtcagggagattgaatccgatatctctttcatccgcaattatttaaccaaagaattagtcatgcgcgaggatctttatttgtttcaaaaacagggccgagattataaaatcatcgataaacagtggaagtcggtgcgcgaccagctcgtaagcatgcgggtaaatggcggttttccatatttgacagtaaacgacggcgattatatgaaaaataacgagctctatattaagcattggtatgaaggaatagagttagatttgaaatatttggagaaagtgctcccttatttattccagctttggggaagaagcgtgcacattgagtctgtgcttgaggataaggaagtcatgttttcctacgacggaaaaggtgttcaccgcagatatttataaaaaagaggatgcagcgttctgcatcctttttattttccagtttttaaaatcttaaatatgatgtttgcctggtccgtattgttaatcaatccgcggaatttttcttttccggggccgtacgcgtataccggtacttcttcgccggtatgatcggtactcgtccatccgctgttggagcgagtattaaaaatcttgatgatggctttgtaggcccctttgcttttgtcagcctgtgcagctgcttcaacgcttttgatttcttcagatgtgaatttcagattggcatagcgggcgagcacatctttaaccggcttgccttcactgatttttttggccatgaattcaggtgttttcttagcggagagaatcggttctgcgtgccaattcttttccccgtttgcgccaatggtaaagccgccggttgtatggtcagcagttgcaatcacaagtgtatgtttgtcttttttcgcaaattcaatcgcggctttataggcctgttcaaaatctttaacctcgctcatagctcctactgtatcattgtcatgggccgcccagtcaatctggctcccttcgaccatcaagaaaaatccttttttattttggttcaggcgatcaattgctgaaacagtcatttctttgagagacggtgttttgctgtcacggtcgagcgccttagcaagccctccatctgcgaaaagcccgagcacctgctgatctttatttttcttcaatgcttgtttagttgtcacatagctgtagccggcttgtttgaattcctttgtcaagtttctgtccttgcggttaaaataagattttccgccgccaagcaaaacgtctattttatgtttgccttttattttgtcatccatatagctgttggcgatttcgtccatgtttttccgtgattcattgtgggcgccatatgcggctggagtggcgtggttaatttcagacgtggcgacaagccctgttgacttgccttgctgtttggcctcttcaagtactgatttcacttttttcccgtttttatcgacgccaattgcattgttatatgtcttaacgcctgtcgctaatgctgttccggctgctgctgaatctgtaatattatagtcagggtcatccggatgcgtcatcatcatgcctgtcaggttccggtcaaattctgttaacttcgggttattcggtgtgtcaccgttatttttcatggaacggtaggctcttatgtaaggcgtccccatgccatcgcctatcatcacaatgacatttctgatctcagctttgttttgttttttggcgctggccttttctgtttgctgcagctcagctccggcaaagattccagctgtaaggacagaaacagcggcgattggcagaaattttgatttcatattttgaaacaaattcattttttcatgcctcctttaatgtattccgtttatcacgttagggaaattttgttaaatgcggctgctgatcatgtaaacaataagtaaagccttgtaaggaaaatgaaaaaacgcttttcgttatcttgccttatttgatgtaaagcattcatttttcagaaaaatctttacctctctgtctttgcatgatatgtttgtttaaataaaaaaactgcggataaccgcagctctcctcgaatattctttatcactcatttttccggtatgtgagccgaccccgaaagtttttcatttatttcctttatgttgaaaaacatcccataaaacatgacaaaagcactcgttttttgtcacctttgcaacgaaaatgaaatatttaatacccttaaaaacttttttttagaacgaataattaagaaatttgtcacatgaagtcaagactatttctgatgggaatctatccttataatagaaatcaataagattaattaaaaaaagagatacatatatagagagttaacatttggggaggaaaatatgaaaaagcaaatcattacagctacgacagcagttgttttaggatcgacgttatttgcaggagcggcatctgcacaaagcattaaggtgaaaaaaggcgacacgttatgggatctttcaagaaaatacgacacaacgatcagtaaaattaaatcagagaaccaccttcgttcagacattatttatgtgggacaaactttatcgattaacggcaaatctacaagttcaaaaagcagcagttcttcttcctcttcttctacatacaaagtaaagagcggggacagcctttggaaaatttcaaaaaaatacggcatgacaatcaatgaactgaagaagctgaatggcttaaaatcagatttgcttcgtgttggacaagtcctgaaactgaaaggttcaactagttcaagcagctccagctcatcaaaagtgtcatcgtcttcaacttctacttataaagtgaagagcggagacagtctttctaaaattgcgagcaaatacggcactacggttagcaaattaaaaagcttaaacggcttaaaatcagatgtaatctatgtcaaccaagtattgaaggtgaaaggaacaagcacaagcagctcaaaacctgcttcatcttcatcatcttcaagcagcaaaacgtcatctacatcacttaatgtgagcaaactggtttctgatgcaaaagcgttagtcggaacgccatataaatggggcggaacgacaacttcaggctttgactgcagcggattcatttggtacgtactgaataaacaaacaagtgtgggcagaacaagcactgcaggatactggagttctatgaagagcattgccagcccgtctgttggtgatttcgtcttcttcacaacatataaatccggcccttctcacatggggatttacattggaaacaatagtttcattcatgcaggatctgacggcgtacaaatcagcagcctgaacaacagctactggaagcctcgttacctcggtgcgaaaagattctaatttttagagaaaacccgttcattggaacgggtttttttcattagacggagcacaggcgttttggttgctcctaaaaatgaaaatgtgataaaaaatccaagaattttttttctttcttattttcataaagggcaatcgcgtaagcgccagcatagggcagctgtacagactgataaggaattctgatcatctgtttctctgctaactcacgctttactgtagataaaggcagaaatgaaactccgagtccttccttgataaaccgtttcgttatatgtgtttgagtgaccttcattgttctcacaaatggaaatgtcattctgacttgacggagcaagtcgtcccagtaatcaggatgattatgggtcaaaagcaggtattgttcgagcacctctttggcatcaatttctttgtcttctatgaaacgcttatcgggcggggcaacaaggacgacagggtctttgtataagcagtggcagcttaaagaagaagactgtacctttaaacagcttagtccgatatctgcttccccggctttaatcagtgacgcgatttccgctgattcgaaaatcgtaaccgccatttctgtttccgtattcattgctgtgtaccgtttcatgacagaaggaagcacagtatctgcaataagcggagaaaccgcgagctgtaaggtttgagagtagccttgtctcactctgtgaagctctgccatgctgttttcataatcatcaagaagcctgagcgcatacggcaaatacgccctgccttcatcagtcagctggatttgcctgcctttacgctcgaacagcttgcagctgatttctttttctaattgcttgatatgtacggtcacagtaggctgagataagtaaagcgtttccgccgtttttcggaagttctcatattttgcagcggtcacaaaggtgtgaagccatttgaaatccatttctattctccctctgattaatatttttaattaattccctttaaaatattcattattttttaaatattatatttactataataacagaaaaggatagggggaattcaaatggtacattacggattaaagggaattacatgtgtggaaacatccatcagccatattgatggtgaaaaagggcgtctgatttacagaggacatcatgcaaaagacatcgcactgaatcacagctttgaagaagcggcttatttgattttatttggaaaactgccttcaactgaagaattgcaggtatttaaagataagctggctgcggaacggaatcttccggaacatattgagcgcttgattcaatcactgccaaacaacatggacgatatgtcggtgctgagaacggttgtttcagcattgggggaaaatacgtacacattccatccgaaaacagaggaagcaatccggctgattgctatcacgccttccatcattgcatacagaaaaagatggacgcgcggtgaacaagcaattgcaccttcttcccagtacggacatgtcgaaaactactattatatgctcacaggcgaacagccttcagaggcaaaaaagaaagcgcttgaaacctatatgattctggccatggagcacggcatgaacgcatcgactttttcggcacgagtcacgttatcaacagagagtgatttagtgtcagccgtcacggctgctctcggcacgatgaaaggtccgctgcacggaggcgctccttctgcggtgacaaaaatgcttgaagacattggagaaaaggaacatgctgaagcatatctgaaagaaaaactcgaaaaaggagagcgcttgatgggattcggccacagggtgtacaaaacaaaagacccgcgggcagaagctttgagacagaaagcagaagaggtggccggcaatgaccgtgatcttgatcttgcgctgcatgtagaagcagaagcgattcgtttgctagaaatctacaaaccgggacgaaagctgtacacaaatgttgaattttacgcggctgcagtgatgaaggccatcgattttgacgatgaattgtttactccgaccttttcagcaagccgaatggtagggtggtgcgcccatgtactggaacaggcagaaaacaacatgattttccgcccgtcagcgcaatataccggtgccattcccgaggaaattctttcataacatattttggcgtttattcatttctgtcgtgtggtaacgttcagtatcaaccacatgtctaggagtgatgaatggtgaacccaatggacagacaaacagaaggacaagaaccgcagcatcaggacagacagccgggcattgagtcaaaaatgaatccgctgccgctgtcagaggacgaggattatcgaggaagcggaaaactgaaaggaaaagttgcgatcattactggaggcgacagcggaatagggagagcagcagctattgcctttgctaaagagggggctgatatctccattctatacttagacgagcattcggacgcagaggaaacacgtaaacggatcgaaaaggagaatgtccgctgcctgcttatcccgggagatgttggggacgagaaccattgtgaacaagctgtgcagcaaacagtggaccattttggtaaactcgatatcttagtgaacaacgccgctgaacagcatccccaggacagcattctcaatatttcaacagaacagctggaaaaaacctttcgcacaaatattttttccatgtttcatatgacgaagaaagctttgcctcacctgcaagaggggagtgccattattaatacgacatcgattaccgcttatgaaggggatacggcgttaattgattattccagcacaaagggtgcgattgtttcctttacgcgttccatggcgaagtcgcttgcagataaaggcatcagagtgaatgcggtggcgcccggtccgatttggacaccgcttattccggcgacattccctgaggaaaaagtgaaacagcacggcttggataccccaatgggaagaccgggacagccggttgagcatgcaggcgcctatgttctgctggcgtctgacgaatcttcctatatgacagggcagaccattcatgtgaatggcggccgttttatttcaacgtgatcaacgaaaaaccagctctagagctggtttttttgtgtggtaaaaaatttcaaaataaaaaatttgtcgatttttctaacaattttgttttcatttttgcaattttatatataatattgagtaggagaaaggaatgattcgcgaccagtacaaatatagtagaaaaaaagaaaaatgaccattgttactcatgaattcagaaaattcaaataaaatatataaaaatagatgatcgggagttgaaggggaatgaaagggagcgtttttaggaagaaaagcattcaggatttaatcgctgcgacgagcggggaaaaatctttaaaaagagaattaggggcatttgatttaacgttgcttggaatcggcgccattattggcacagggatttttgttctgacgggaacaggcgcagtcacggcaggtcccgggctgacgatttcatttgttgtggcggcgttggcttgtttattcgccgccctgtcttacgcggaatttgcgtcaagtgtgcctgtttcaggttcggtgtatacattcacttatgcgacattgggagagcttatggcctttattatcgggtgggatttaattttagaatacatgctggcggtaagtgcagtgtcggtcggctggtctggttatttccaatcgtttttatcagggctcggcattcatcttccggttgctttaacagcggcaccgggcgcagtgaaaggcacctttaccctgtttaatcttcctgcattcgtcattgtaatggcgatcacatatttgctttatttaggcatcaaagaatcaaaaagagtcaacaatatcatggttatcttgaagatactggttgttctgctgtttatcgcggtggcagccgtttacgtgaagccgcacaactggcagccgtttatgccaatgggctttggcggcgtattcagtgcagcggcgctcgtattctttgcttttatcggatttgacgctgtatcctctgctgcggaagagacgaaaaatcctgcgaaagatctgcctaaaggcattattttctctttactggtctgcacgattttatatgtcaccgtatcagcgatcatgactggggttattccgtttgctcaatttgcgggtgtggatcatccggtttctctagttcttcaaagcgcaggacaaaactgggtggcaggcatcattgatattggcgccgtgttgggaatgacaacagttatgctcgtgatgctttacgggcagacacgcgtcatgtttgccatgtcgcgtgacggacttgtgccgggttcactttctaaagtgcatccaaagcacaaaacaccttatgtagccacttggtttttcggaacgatgtcggcgcttctcggctcacttgttccgctggatgaacttgcaaagctggtgaacatcgggacgctgtcggcatttgtacttatttctgtggcagttatcgttttgagaaagaaacagccggatcttccgagagcctttaaatgcccgggagttccgtttatcccgggcctggcaattctgttctgcctgttcttgattttaaatctgggatgggtgacgattgtccgcttcctagtgtggctgttaatcggcttggtaatctatttcctgtattcaagaaagcattcaaaattaaatcaataaccttttgataaagagagcggccatacaggccgctctcttttctgttcctggcaaatgaatctatagaaatgaagacaaaaataagagataatataggctggaaaggaagtgacgtttattgtctgagcaaaaaccagtccaatgggcttcgaaaatcggtttcgtcatggcagccgccggctcggctatcggcttgggcgcgatttggaagttcccttacgtagcggggaccaatgggggaggagccttttttcttatcttcgtgttatttaccatcctcttaggctatccgcttttggtgggggaatttatttttggaagacggaaccagacgaatgccattgatgcatataaaaaagaagcgccgcgatcagcttggtttcttacagggtggatcggtgtagccgcgtgtttcttagtgctgtcgttttacagtgtaatcgggggatggattttgctgtatatcgtgaaaacagcgtcaggatcactgtccgggctttctcaagcacagtatggcgctctttttgcttctattatccaaaatccggtgcagacgctcgtggctcagcttgtctttatggtacttactgtcatcgttgtcgcaagaggggttcaaaaagggattgaacgggtaagcgcggtgatgatgccgattttgtttttattgtttattctgctcgttcttcggtctcttacgcttaatggtgcaatggaaggcgtaaagtttctgcttgtgcctcatttcggcgatctgactccggaatccatattattcgcgctgggacaggccttctttacgttaacactgggggtttcggttatggtgacctacagctcctatttgccgaaaacacaaaatatccctcgttcggcagcctccattgtcttgatgaatatcattgtgacactcttggcaggtttggctatttttccggcggttttctcattcggttttcagccaaatgaaggaccgacactgctgtttacagtgcttccggccgtttttgaacagcttccgttcggcacgttgttttttatcggttttctcgttgcatttttatttgcagccttaacctcagcattttcgatggttgaaattatcgttgccacaatcggaaaaggggacgaaaagaagagaaaaaaactgtcatggacgagcgggcttttgatctttttggtcggaatcccatgctgcttgtcttatggcgttttgagtgatgtgcacctatttggcaaaacgttttttgatattgccgattttaccgtcagcaatgttttgatgccttcaggcgctctgttaatttctctatttatcccgctgaaaatttcgaaaagcgaactcttggctgaaatgcgaaatggatcaaatgcaggtaaagcattcttttacacgtggttttatttgcttcgttttatcgtgccgcttgccattattatcgtgttcttaaatttaatcggaattttatcattttaaaaaaacaggctccgtttccggggcctgttttttatttaataagatgatatcaacggtgcccatgccgttttcagtttttggatgccgagcctgatgtcctcttctgacaaaccgccataaccgattaagacagaagcaaaaggcgtctgttctttatatgagggagacacgggatagatggttacaccgtggtctgcggctgcttgtattgcttcttcctcacttgctggaaacaaaaggcgcagcaggatgtgaagccccgagttcttaccgagaatctcaacggtgtttcccagttcagagcggatggcttctaacaggacagcgtgtttttttcggtataagcttctcattctatttatgtgtttttgccactctccggtttcgatgaagtctgccagtgccaattgtgagtgggcagaaacggtctgcttcattaactgagcattgtttttgatcggttccatgagttcatggggcacaatcatgaagctgagccgcaaggaaggcagaagtgactttgaaaaagtgcccagatatatgactctgccattcggatcaagactctgtaaagacggaatgggatggccgctgtagcgaaattctccatcgtaatcatcttctataatgaatgaatttgtttctgccgcccatgccagcagctcctgtctgcgggtaatcgtcataatggtcccaatcggaaactgatgcgaaggagtcgtatacatgagataaggattctgacggtagagctcatccggcaggacgccttctgcatcagaacaaatcggagtgacatccatgtgatttgcttcaaacatccttcttgaacggtgaaagcccggttcttcaaagccgatttttgtacctggctttagcgaaaggcaaagaatttgcagaagcacggtggttcctgcgccgatgataatctggccgggttcacaatttactccccgagacagcctgacgaatcgggcaatcatgtgcctgagttcgtattctccttgagggtcgccagaggtgtgaaacgatccggaatagcgatcaagactttttactatgctttttctccatgcgttaaagggaaagagggtcgggtcaacgctgccctgatggaagtcaatagcaggtgcgttcttttcatgtaatcccggctgtacagactgctgaaaatggtcaggagctgtcgggaatcctggttctacttccgccgcgaaccagccgatttttggcttgcttttgacatagccctcagcagttaattgctcataagctcgttctatagttgccgtgctgacatcgagcaagctggagagcctgcgttttgacggaagtcttgttccctttgtgattcgcgcatgtgaaatttctagtttaaaaaaggtataaagctgctcatacagcggtgttttgctctttttatcaagaaacggcgtgatatccatctcgtgtctcctttttatctggcatggttattttttctgatattggctatttggcaaatgccatttattagctatgatcattgtaacgaaaggaaaggggattgagaagatgatccatatgaaacaattaacctcgaaagaagaatgggctgagtcgtatccgattatgagtgaattgagaacagaactggatatagagacgtatttacaaaggcttgaagcctgtgtgcagaaagaatcgtatatgctgtttgccttatatgaaaatacagcaatcagagcgctgtgcggggctctgccgagagtttccattcataaaggagagcacttgtggattgcggatcttgttacaacggcaccttgccgatcaaagggatacggcaaaatgcttttggattatgcctcagactgggcgagaaaagccggacttggttttgtcagtctttcatctggccttcagcgtaaagacgcacatcgattttatacagataaaatgggttttactatagaaagttatttgttccgaaaaccggtataacgaaaaaagacgcctgaaaaggcgtcttttttaaaagccaaactgtaaattcgtatctacagatacaatggtatacacacaaataatcacaaagagattaaggatgacgccgagcaggccggggcctgtgcgccctctcttgatgaagagttcaacaacgccgaacggaacggcagccatggcgaatggaagcatttgataggaataaaacgtgacattgctgataatggccaaattcagcaacagcagggacagaaccgctgtcccgacagagatccagccgaatacattgtgttctttaaaaattcttaccagttccataattccacctcgccgacattcgctgattttacagatttatttttcagcatgcgctggatttccttggttggccctgtaacgaccgaaccgtatacattgacaccgtttttctctacataatctaatcggttatctacattcaggtctttccgttttgaaatgacctgagcccatttttcgtgtttggacatgaattttagggcgttgataaactgatcgccattcgacttgccttttgtattaagggcggccaagaactttgaatcctttccaggatagccaagaggttctgtggaagctgtcttatttgtgtttttctctgtttcgattgcgttccacaaaaagctcacatcatagcctttgaatttgttatacacgtcttttgtcggatatgcacggtcatatgaaaggtagacctctgataccgttccttcaggcaatgtgcttaacgttttttctgcttttgcggtcgtttgttcagacttgtttgaaggatgtgtaaagtaatgtccggttttattcacttctaagtcatagtagtttactgccggcgcttttactttgttataaaacatttcaacccgttcattccctacggcagccgtcttcgtgccaatctgcttttgcagcgggaattccgtattcattccaaatagcttcacttggcttttcagtccggaagtatcaacaagaacattcggcatggtcagggctacagtgactgcggcagtttccataaactcattgccggtgctgtgtttcccacccattccgtaatagaggtagcttcccagcgtacaaagcggcaaaatcatcaatgtcgaaatgacggcaagcacagaaattcgcaaataagacttgcgtttgccgtaggctaaaatcgctttttgtttttcaggactgatgctgagatcccaatcgttatcgtcctctagttcgctgtcaatcagttcctgatatacttcgagcttctcaagttcttcctcaaatgcagtcatttcctggtcgctcatttccccatttttatattgatcaaaacgctttttaaattcttcattcatcattaacacctctattataaagtgctttcagccgctgtctggcacgaaataaaacacttttaaaattcgcctctgaaatattcataatatgggatgcttctttgtagtttaactcttttaaataatatagcgttaaggcctcccgataattatcggggagctcggacatataaccagtcagcacttcctttatctctacctgatgggcaggactttgaacagcattttgaaagaggcttccgattaagtcatcagaaatggttacttctttcttatgctttctgacgtaatcaatgaaggcgtttcgcgccacttgaaaaagccagggctttactttgctgtgatcataggagtgaatgtgtatgtatgcccgcataaaggtttcctgcagtaagtcttcagcaagatgcttgtcttttgtcatggagagcaggaacctgtaaacatcattcatgtacatttggtaaatttcatcgatcgtcactgccttttctcccctctatgttatacacgcataagaaaggtttaaagttgcacattacatgcaaacggcttttttatacctaatcaaacaccattactatatagtacccaaaaatggccgcaaaagatagtgcggagaaaggtttaacattttttccagaggggaaaagatagtgaaaaagtgaaggagtggcacaatggaatataccagtatagcagatacaggaatagaagcctccagaatcggcctcggcacatgggccattggcggaacgatgtggggaggcactgatgaaaaaacatcaattgaaacaatccgcgccgctcttgatcaggggattacactgattgacaccgcgccggcttacggcttcgggcagtccgaggaaatcgtcggaaaggcaatcaaagagtacggcaaaagagaccaggtgattctcgcaacgaaaacggctctggactggaagaacaaccagctgttccgccatgcgaacagagcgagaattgtagaggaagttgagaattctttgaagcggcttcaaacagactatattgatctttatcaggtgcattggcccgatccgcttgtgccaattgaagaaacggctgaagtcatgaaggaattatatgatgcgggaaaaatccgggcgattggcgtcagcaatttttcaattgagcaaatggatacatttcgcgccgtcgcacctctccatacgattcagcctccatataatctgtttgaaagagagatggaagagagtgttcttccttatgcgaaagataacaagataacaacattattatacggcagtttatgcagagggctgttaacaggcaaaatgaccgaagaatatacatttgagggcgatgatctgcgtaatcacgatccgaaattccagaagccccgctttaaagagtatctttctgctgtcaatcaattggataagctggcgaagacacgttatggaaaatcagtgattcacttggctgtcagatggatcttagatcagccgggagcggatatcgctctttggggagcaagaaagcctgggcagcttgaggccctatctgagattacaggctggacgctgaacagtgaagatcagaaagatatcaatactatattggaaaatacgatatcagaccctgtcggaccggagtttatggccccgccgaccagagaggaaatataacaaaagctgagggcgaatcctcagctttttggcgttttaacgggagaaatcttaaaaattagtaccaggtaataaaaaatgttgttataatagaagatagaaagaatcattgattacgacaaaggaagtgcgatatgtataagttttgtgcaaatgctttaaaagttattctttctcttcgcggaggagtgaaggtgtataacaaagaaaaccttccggccgattcaggttttgtcatcgcgtgtacacattccggctgggttgatgtgattacactcggagtcgggattcttccttatcaaatacactacatggcgaaaaaagagctttttcaaaataaatggatcggttcgtttctgaagaaaattcatgcctttccggtagatcgggaaaatcccgggccaagcagtattaaaacgccgattaagctgctgaaagaaggagagatcgtcggtatcttcccaagcggaacaagaacctctgaggatgtgcctttgaaaagaggtgcggtgacgattgcgcaaatggggaaagcgccgcttgtccccgctgcatatcagggcccttcaagcggaaaagaattattcaaaaaaggaaaaatgaagctgattatcggtgagcctcttcaccaggctgattttgcccacctgccttcaaaggaaagacttgcagcaatgacagaggctttgaatcagcggattaaagaactagagaataaacttgatcagctataaggcgttctgagagattgccctgaaactgtgaaaataagaaaagcaccttatacaaggtgcttttcttattatgcttcctgctggttagctgtctccagaagttcttcttcttgaagctttttcacttcaatatatgcgacgtggtggccgtcaatttcattaatgatgaattcgcagccctcttcgatgatggaatcatctttttcaacatcgtatttttgagtaaggaaccagccgccgattgtatcgacttcttcgttctctaaatgaatgcctagcaggtcgtttacttggtcaattaacacttttccgtcaagaatataatggccttcgccgattttgcggatttcgctaatttcatcaatatcaaattcgtcgcggatttcaccgacaatttcctcaatgatgtcctcaaccgtcacaagcccggcagtaccgccgtattcatcagacaatatggccatgtggaccctctctttttgcattttgacaagcaggtcttggattggcgcagattcaatgacatgaatgatcgggttgacgaattgagaaatggtggaatcaacagatacctcaccgctgatgcaggcggtcagcacttctttaatgttaataaccccgataatgttatctttatcgccctcttccacagggtagcgggtatatttttcaatctgaatgatgtccatcatttcagaaatcttgatatcatgcggaaggctgacaatttcagtccgcggaatcataatttctttcgcgagcctgtcgtcaaattcaaagattttattcacatatttaaactctgattggttgatttcaccgcttttatagctttcagacaaaatgattcgcagctcttcttctgagtgtgccagttcgttttctgaaacggtctccaggccaaatgctttggtcaataaccgtgcggaattgttcaaaagccaaatgaatgggaacgcgatgcggtaaaaccaaatcagcggtttcgcaaacagcatagacactgcttccgccttttggatagcgactgttttaggtgcaagttctccgacaacaacgtgtaagaacgtgataatggcatacgcaaaaataaacgatatgacatgtgaaagggaacctggaacattcatttggacgaaaagcgggtgaagcagcctttcgatcgttgattcacctaaaacccctaatccgatggaagtcaatgtaattccgagctgacacgcagataaatattcatcaagatgcgtggtcactttttttacggctattgctgctttatttccttccgcgatcagctgatcgatccgtgagcctctgattctgataatggcaaactcagatgccacgaaaaatgccgtcagggcgattaaaacagcaactaaaatcaaattcactatgtccaattagaaccttcactctagcaatgagaatgaaggtaacacctcctgttagataaaatggttttaacttaacagcagcataaatgattggaacacggcgagcttttcaggcgggagtttgcttttcagcttgtcacgatcctcgggcttcagccgttcaaaccgatgcaagattccggagatgttttgattcatatgatcaatttctaatgccagatttccaatttcatcatcaagtttagctgaagagggaaactggttctccagtcgatctttaatatcggacagggccaatcgctgcttcttgcaatctacaataaatataagtcttttgagtgcattttcgtcgtagtaacggtaatttgaacaggatctggccggcgtaagcagaccaagattcgtataataatcaactgtccgtttcgttactccggcgagtgccgctagttcactgatgcgataagtctcagccccatctatatccctcccaaccatcacgttatagttatgagaatagtttaatatatgaatggtgtcttgcacaagtttattgttttttttagaccggaattggaagttgtggaattcatcatctgattgaagtaacataggaagatagaattttcaaacttttatatacggaagggacagatgaaattggctgggttatcccgggaagttgaagaaaacttaaataaaggatcatggattcgcaagctgtttgatgaaggtgcaaggctgaagaaggagttcggggaagaccaggtatttgatttttcactcggcaacccgattattgaaccgcctgaagcttttaagagagcgttaatagaggaagctgaaaaaggcagccacggatacatacaaaaccaagggcttcctgcagcgagagaaaaagtcgcgcaatttttggggtcgcgttttgaagctgatttctcagcggagcgtatcgtcatgacggtgggcgcggggggcgctttgaatgttgcgttaaaaagcatcgtaaaccctggggaagaggtcattattctcgcaccttattttgccgaatataagttgtatattgagaactacgggggaaaagccgtcagctgcccgttgacaagccggtttgagatcgacattgaagcggtaaggcaatcgatcactccacagacgaaagggctgatcctcaatacaccgcataaccccacaggcactgttctcagccagaaaaatatagacgatttaggcgctttattaaaagaaatagaagagaagagcggccagacgatttatgtgctgtttgatgaaccgtacagtcaattaatctatgatgaagagctggcaaatccgtttcaatcgtaccatcgtgtgatattggccagctcattcagtaaagatctcggcatagccggggagcggctcgggtatatcggattggacagccgaatgccggatgcggaccttttgatcaacgcttttgtgtattgtaatcgaacgcttggatttgtgaatgcccctgtcatgatgcagcgggctgtggcacgaatggatgatttaagagtagacgcgagtgtttataaagagcgccgggatttaatggtagacattttaaaagaagccggttttgaatttgaaatgccaaagggaggtttctttgtttttccaaaatcgccgattgaagatgaagttgcattttgcgtgcatgccgcccaaaaatacaaattattaattgtgccgagcagcggttttggaatgagcgggcattttcgattatccttcagtgtgccgatcgagcagattaaaaactcacgggacattttcatttctttatataaagattttgcttaagaaggcaaagaaaagaaaacagttttcaaggctgttttctttttatatccacaaaatccttcctcttccaatccagacaggcgaagaattgacaagcaggcatgcagttaagtctttcttcatgataaaagtctaaaaattaaaaatcatttttggaatgagttgtgttacaataaaatatacaatttataatcaaactttgacttttggaggtggtaagatggggccctctgcttaggcaacaatacaccgcgtacctcaatgttaaggaaaaatgattatatcaggaggtgactccttatcctttgttgagaggatagggttaaatggacgatattgacagtctgattttaattggcgtgctcattgctttaaccgcgtttttcgttgcaagcgagtttgcgattgttagagtaaggagatccagaatagatcagcttatcacagaaggaaacaaacgggcgatactcgcaaggcgtgtcattacagatttggatgaatatttatccgcatcccagctaggcattacattgacatcaatcgggcttggcgtactgggtgagccggcctttgaacggctgctgcatccactgtttgaaccgctcggcttgccggactcggtttcacatgcagtctcttttgcagtcgcgtacggcttgatcacgttcctgcacgttgttgtaggtgaacttgccccgaaaacggtcgcgattcaaaaggcagaacagctgactttactgatagcgggccctttgcgtttattctatttgctcctgtttccgtttatttggatcctcaatggatcggcgcggcttttatgcgggatgttcggtttgaagcctgcgtcagaacatgatggttcccattctgaggaagaactcaggatgctgttatctgagagtttaaaaaacggagagattaatccgtctgaatataaatatgtgaataagatttttgaatttgataatcggatcgccaaagaaattatgataccgcggaaggaaatggctgctgtgtcaactgagatgacgatggccgagatgcttgaagtcatgctgaaggaaaaatacacgcgctggccagtcacagatggagacaaagacagtgtgatcggtttggtcaatacgaagcatttgttttctgatttgctgtttatgacagaagaagaacgaatgaagatgacgatccatccgtatgtgaggccggtcatcgaagtgattgaaacgatcccggttcatgatttgctgattaaaatgcagcgcgagcgcattcatatggcaatattgtcggatgaatacggaggaacctcgggacttgtgacgacagaggatattcttgaggaaattgtcggagagatcagagatgaatttgatgaagatgaacagccgctgatccaaaagcttggcgacggccattatgtgatggatggaaaggttcggatcgatcaggtgaacagccttcttggcgcatcgattcaagaagacgtcgatacgatcggcgggctgatattaaaagaaaacatcgatattgaggctggtgaatccattcgcatcggttcatattcgataaaggtgctgaagatggacggccgattaatcaagcaaatcgatataaaagaagaagccggcaacacaaccgggattacggcgcaccacaagctgctgctgcccgatcctgtgatgctgaacagtgcaaccttgagcgagaaataagctcaaggtttttttacattgtgattgtccagccgcaccaaaatgccaaaagcgatccgcaaagtgtcagggcgatgtacaagatgctttctattacacgtttggccataaggagttgaatagtttcaacgctgaaggtggaaaaggtcgtaaaggcgccaaaaaaccccgtgccgatgataagcgagaccgaagcatttgcaacgtgaagtcctgtaaatattccgagcccgagagctccgagaatattgactgtcagtatgccaatgggcaggctgagacctttggttttggcggttatgacattgccaagccagaagcgaagcattgcgccaagtccgccccctatgaaaatacccgctagtgtcatctttcctgcagcccctttctttgctgaatgcctgctatgcgccgtcccgcaaaaacaccaatcagtgcaaatatgatccctgatatcaatgaggctgccacatataaaagagccaatgagggttgtccttgcaaaagcatcactgtttccttagaaaacgtggacattgttgtgaagcctccgcaaaagccggtgcctaaaaaagccgacagcagaggccgttttgccccgatcagaaaaaatccggtcaaaatgcctaatagaaggctgcctgccgcattttccagccaggttgccgccgggaactgaccggtgtgtatccataagtttaatccgtatcggaggcaggcgccaagcgcgcctccgataaaaaccgcgctatatattttcatgtttgccatcctttatgatgaaatccgggtaatctgtaacgatgccgtccacgcccatggcttgtaattttgccgctgtcttttgattgttgacagtccatgcaaatatgtttaagccatttttatggatggagccgatcatcagacggttaagccgtgtgtgttttatattgacatagtttgcaaaagagcggaaggccttcatctgatttctggacagcatgccaaagttgggccttgtaatgaccgctgtcggaatcgaaggataaagctcgcggaacctttggacggagcggaactgaaaggattgaacaatattattgatagaaaaagaaaattgccctaatagctgtcccacctcttcttcaattccgacttgagacggatggccttttagttcaattaaaaggccgatttttttgtggtagcgcttgagcaccgcttccagggttggaatacgctctccttgaaaagcgggaccgtaccagcttcctgcatcgagtttttgcaattcctccaaggtaaaatccttaacaaagcccgatccgtttgttgttcggtcaaccctgtcatcgtgtatcacaacaatctgcctgtcttttgtaagctggacatccagttcgatcatatctgcattcattttcaccgcaaggtcaaatgcggcaatcgtattttccggagcgtagccggatgctccgcgatgggcaatgatgtacaagctaagtcagctcctcgtatgggcatttctgttattgtatcaaatccatatatgcaccgcgatacaaactggtgaattttttctgccatatcggaatggtccgggctgaggaatgcgtataactaaaaaaagacactcagcgtatcagaacacatttcgtcagaaaattaggtctttcgacatgttcacaacaaaatatgatcctttataatagcaaaaaaggaggcgagatcatgggaaaagggagaatcagagtggaggaaagaattaaagccgaaacggatgctgaaatgcaaaaagcaactctccttgatcagacacaaacgaaaaaaggtaagtgactgtccctattgaatctggctgatagatgaattgagaaatgaccccggcgtttcgccggggttttgtgctgcaaaagacatttaaatgaacatccttacgaatattttagtataataaacaattgattgggatagaggggagacagtcatgccggattatctgcagcagtattttacgcttgataacatcatacaaatcggcatcagcttggcgattttgctggtgtttcttatacttagaaaattattcacaagatatttctttaacctgctttttaatttgacaaaccggccgaaaacagaaatttttaaacaggtggttctggcgtttgataagccggccagatggttttttgttgcccttgggctgtttttagcgatccggtattcaccgtttttagatgagcaaatgccggtcatcagcaaaatataccgctcactgattgtggcgcttttgtgctggggtctttgtaatttgaccgcaacatcgtcgtttatcttccataaggtgaatcagcgcttcgagcttgacatggatgacattctggccccgtttttatccaaattgctccgttttgtgatcattgcgctcagtgtcagtgtgatcgctcaggaattcaattatgatgtaaacggatttgtagcgggccttggtcttggcggactggcttttgcgcttgccgcgaaggataccatcagcaacttcttcggcggtattatcattattactgaaaagccgtttacaattggtgactgggtggagacgtcgacagtaacaggatcagtcgaggatattacctttaggagcacgagattcagaacagcacagggggcgcttgtaacggtgccgaactctacgctgtcgatggaagcgatcacgaactggacaagaatgaccaaacgccagattacgttttccatccatgtgtcctacgctacgccgattgagaaccttgaacgctccattcattctctcagaacaatgctcttagagcatgagggcgttgataatgaaacaatcatggtcaactttgatacgtttgccgacagctactacaatttattttttaacttctatacaaaaacgacggtttgggctgaaaaccttaatattagagaggatatcaactataaaattattgagattttaggtgcagaaggtgtccagtttgcatatcccggccaaatggttgttgtcaagcaaaagcacgaaagtgacccattccaggtgaatctaaataaagaggaaaaggaacgggcttaaaagagagacttcgtctgacagaggcggagtctttttcatggtaaaataagagaaaaaggcggtgttgagttggaaacattcaaaagtattctacatgaagcacagcgaattgttgtgctgaccggagcgggaatgagcacagaatcagggattcccgactttcgttcagcagggggcatttgggcggaagatgcctcaagaatggaagcgatgagccttgattattttttaagtcatccgcgtctgttttggcccaaattcaaagaattgttccagatgaaaatgagcggcagctttgaaccgaatgaaggacacttgcttttagctgagctggagaagcaagggaagcaggtcgatattttcacgcaaaacattgacggtcttcataaaaaagcggggagcaggcatgtatacgaactgcatggttctatccagacagcagcttgtccggcatgcggcgcccgatatgatcttccccatttgctggagcgggaggtgccggagtgcacggcggccggaaacaatggggacatttgcggaacggtattaaaaaccgatgttgttctctttggcgacgccgtcatgcactttgacaccctttatgaaaagctggatcaagcagatcttttattggttatcggcacgtctctcgaagtggctccggctagatttgtgcctgaggatgcaagtctgattcccggcatgaagaaagtcatcataaaccttgaaccaacgtattgcgacagcttgtttgacatggtcatccatcaaaaaatcggtgagtttgcccgaagtttgggcataaaaaagtgagccgccttatgcgcctcacttttttattcatgaacaggaaccattgtgtcctctaacactccgaaggaatagcctttttcttttaatttattgattagtaccggcagcgcgtttacggtagcgggaagatcatgcatgagaatcacattcgggcggcctgaagagctgtgttccatattttcaagctgctctaacacggccgtcacatactgtgaatttcggtatttccagtccatgctgtcaatcgtccaatcccagtacacaaaaccgtctttctcaagattgcggatttgtgagggggttagtgacggtttgcttccgtagggcgttctgacaagagcggttttatatcctgtaatgtcctgcagtgtgtcacgcgcctcctgcatttcttttagcggagatgtcggtgtttgatagaacaatctgttattgtgggtaacgccatgtaaaccgagtgcgtggccttccttttctgctcttttcacagcctgcttgaattcgttcatccgcggtgacagcataaaaaacgtcgcttttacatcagcgcttttcagtacatcgagcaagcgggttgtaacggctgaagggccgtcgtcgaaggttaagtaaaccgttttatctcccatgttctgctttgtctgcagatgttttatcagcagatcgggggagtcgtttttcagcttaaggctttctttctcatctcgaagctggccgtttgttgtgacagtgacttcctttgctttcgttgaactgttggaataacccaaaatcaccataagcaaaagcagcacacataaaactgctaaacttgcaaatttaaaagcaagcgaaactgcagaaggagaagcctctcctctcgtttgtcgcataacaatctctccattggcataaaatctctacataatgctgtacagcaggcagcttatgaagatgccttatgtttacaacctatgtattaccagtcaagtatacaggaataaaactggaaagcacatagaaaatttgtcgaaatgtcagattttaaggaaaaaataaactcctttccgctatagatctcttgatctttctgtttttcggcttgtccaatatggtagaattagtgataatgacagcttgaatgacatcagggacatctcgaaaagggagggcttttatgaaggttttagtcaatggccggctgattgggcgcagtgaagcatcaatcgatttggaagatcgcggttatcagtttggtgacggcatctatgaagtgatcagggtgtacaaaggagtattgttcggcttacgtgagcatgcagagcgttttttcagaagtgctgctgaaatcggaatttcactgccattcagtatagaagatctcgagtgggacctgcaaaagcttgtacaggaaaatgcggtcagtgagggtgcggtatacattcagacaacaagaggtgtggccccgcgaaaacaccagtatgaagccggcctcgagccgcagactactgcttatacgtttacggtgaaaaaaccggagcaagagcaggcatacggagtggcggccattacagatgaggatcttcgctggttaagatgtgatatcaaaagtctgaatttactgtataatgtcatgacgaagcaaagggcctatgaagcgggagcatttgaagccattttacttagggacggcgttgttacggagggtacatcctctaacgtttatgcggttatcaacggcacggtgcgaacacatccggctaatcggctcattctcaatggaattacacggatgaatattttaggactgattgagaagaatgggatcaaactggatgagactcctgtcagtgaagaagagttgaaacaggcggaagagatctttatttcgtcaacgacggcagaaattattccggttgtgacgctcgatggacaatcggtcggaagcgggaaaccgggaccggtgaccaaacagcttcaggctgcttttcaagaaagcattcaacaggctgctagcatttcataaatgaacgaagaaaagagcccgctttatacagcggagctctttttattttttaacaaatccaatcaaaatggagatcatcggcgatatatagaggaagaacgtaaacgggatgtagtctatgactggaacaccaagtgcgctcgccataaatgcgccgctgacgccccaaggaatcaatgggttaattaatgttccgccgtcctctaatgaccttgtcagaaatttgcgctggatgttttgtttgtcatataaggatttaaatgattgtcctggtattaatatcgataaatactgttcaccggttgccaagttgacgccgatgcttgagcagacagttgctgcaactagacggccttttgagcggatgcctttcatgatgccttccaatagtgcagaaatcaatccgattttctccatcaatccgccgagtgcaaaagcaatcataatgagagagacagagcccatcatggattgcaatccgcctctgttgataattttagcggctgcctcattgtcagtttcgaaagttgtgccattttgcaaagctgtcataaacgcctgcaggctgctgtcgggtacaaaaatagcagtcaaaattcccgaggaaataattccggcagtcagaacggggattactgatacccgtttcattgccagcaaaacgactaagagcggagaaagaagggcccacggtgtcacgtttgcaacatcttttattccggttatgacctgctgaatattatcggttgaagcagcgtccgctgacactgatgaaccgagaaagtaaaacagaacgacagtgatgagcaaagctggaatggttgtgcccatcatatggcgaatgtgttcaaagatcggtatttcgcctattccggctgcaaagttggttgtgtccgacatcggcgacattttatccccaaaacaagcgccgcatatgactgcgcctgctgtccattcaagcggaacgccggccgcgctcgctacgccgatcagcgctaccccgattgtgcttacagttgtcaggcttgagccaacaagtgtgctgatgatcatacatgaaaacaaagcagtcaacagaaggtggcttggttcaataaaggatagggcataaactgtcacagtcggtattgcgccgctgtacatccaggcgccgattaagatgccgatcagcgctagaacaataatcggctgtacgccgtttttgatcccgtctacaatccctttttcaatactcttccaggaaaatccaaaccataaagctgctgctgaaagcatgacaacacttaaaaacagcgggatatgaggttctacatgaagcaagaataagcaagaaataataatgcataacatgaatataaataaaccgacggctaacggaaacgtcagctttttttgagaatccaaaataacaccccatatttatctttaatgcttttgtgcttttgggcacgaaagcattataacagaaaaaaacgaaaatctatgttttttcacaattatgaatataaaagaagtgagcacagggcgtgctcactttacaatcaggacgggtatatccgatttcgctgaaagcttttcacttacacttccgaatattagctttttcagcctgttttggtctctgcttccggttacgatcatatcggcagaaatgcggtttgcatgctcgataattgattcagccggatcgccttctaatatatcgatatctccatctgcctgctgttcattcagcatcattcttgcttcggcgatgacttcttccgtacggtcttcatagatcattggctcaggtgatgttacacccgatatcagcggatcaggaacacttgtcatgcctccgctgatatagcttgcctcagctgcgggtctgggtgggtcgatgacggtctgattgtctttcatatcatgtgaatgggcgacggtaatagcggcatttaaggttttagcaagatcaatggctgtctgaagcgctttcttactattttcacttccgtcaaacgcaacaatgatacggtcagcatggaacatccttctcaccctttcaaagcgtcttacaacactactacccgaatttgagcacaattaaccttttcctattcaagtaatgattgacaataaaaggttttgtttatatgatgataaaaagatgaaatcagaatggaaggagggtttgctatgccaaggaatttgcgtgtttatcaaacagtttcatattggcgcggcaaaccttttgttctgttttcgtgaacggttttttaggtcggaccgcgcgctgaaaagcgctgtgcgtaacatatcggttaaaaaaggcatggagctgacgcttcatgccttttttatatacaaaatctaaggaaagacaggtgtatgggatgtgaagacaaatacagaggcgagggctgttcatgccaaactggatgaaaaaagctgcaaggaaaaaatagaaggcggctgataaggagatggggatagatgttttcagttttgaaaaagcttggctggttttttaaggcgtactggctgcgctatacgattgcgattgtccttttattagcagtcaatgtcattgaaatgtttccgcctaagctcttggggaacgccatagatgatatgaaaacaggggcatttactgcggaagggctgctgttttatatcggtatcttttttgtgctgacggcggccgtgtatatcatgtcttatttttggatgcatcagctgtttggcggagcgaatctgatggagaaaattcttcgtacgaagctgatggggcatttgctgactatgtcgccgccgttttatgaaaaaaaccgaacaggcgatttaatggcacgagggacaaatgatcttcaggccgtcagtttaacgacaggatttggcatcttgacgttagtcgattctacgatgtttatgatgacgatctttttgacaatggggtttttgatcagctggaagctgacctttgccgccattatcccgcttccagtcatggcgattgcaatcagtctatatggaagtaaaattcatgagcggtttactgaggcccaaaacgcgttcggggcgctgaatgacagagtgctggaatctgtttcaggcgtgcgggtgattcgcgcgtatgttcaggaaacaaacgatgttcgccggtttaatgaaatgaccgctgatgtttatcagaaaaatatgaaagtggcttttattgattcactgtttgagccgacggtgaaactgcttgtcggcgcaagctatctgattgggctcggctacggagcgtttcttgtattccggaacgagctgacgcttggagagttagtgtcctttaacgtttatctcggcatgatgatttggccgatgtttgcaatcggtgaactcattaacgtgatgcagcgcggcaatgcgtcattagaccgggtaaatgaaactctttcttatgaatcggatgtgacagatccaaaacagcccgctgatcttaaagagcctggagatatcgttttcagtcatgtcagctttacatatccaagctcaacaagtgacaatcttcaggatatttcatttacggtgcgaaaagggcagactgtcgggattgcaggtaaaaccgggagcggaaaaacgacaattattaagcagcttttgcgccagtatcctccaggtgaagggagcattacattttcaggcgtaccgattcagcaaatccctcttgaccgtctccgcggatggatcggatatgtgccgcaggatcatttactgttttcacggactgtaaaagaaaatattttatacggaaaacaggatgcaactgataaagaggttcagcaagccattgccgaagcacattttgaaaaagatttgcacatgcttccgtccggtctggagacaatggtcggtgaaaaaggcgtggcactgtcaggcgggcagaaacaaagaatttcgattgcgagagcactcatggcgaatccggaaatcttgatcctggatgattcgctttccgctgtagatgccaaaacagaggctgcaattatcaagaacatcagagaaaaccgcaaaggaaaaacgacatttattttgacgcaccgattatccgcggtagagcacgctgacctgatccttgtgatggacggcggcgtcattgctgagagtggcacgcatcaagaactgctggccaataatgggtggtaccgggaacaatatgaaagacagcagctgttcactgcggaagaagggggagcaggggcatgaaaataggaaaaacgttatggagatatgcacttctttatcgaaaattgctgatcacagccgtccttttgctagctgttgccgtcggtgcagaactgactgggccctttattggcaaaaaaatgatagacgaccatatcctcggcattgagaaaacatggtatgaagctgcggaaaaagataaaaatgccgttcagtttcacggcgtctcatatgtcagagaggaccgattgcaggagcctgtttcaaaagcaaaagaagcgcatatttatcaagtgggaatggcattctattttgttaatcaggctgtcagcttcgacgggaatagaacggtttctgacgggaagctgacgatcacaaacggagacaagagccgggcatatgctgccgaaaagctgactaagcaggaacttttccagttctatcagccggaaataaagggaatggtgtttctgatctgcctgtatgggggcttgcttgtgttttcggtattctttcaatacggacagcattatctgctgcagatgagcgccaatcggattattcaaaagatgaggcaggacgtgttttcgcacatacagaaaatgccgattcgctattttgacaaccttccggccggaaaagtcgttgcgcggattaccaatgatacggaggctatcagggatttatatgtcacagtgctttcaacatttgtaacaagcggaatctatatgttcgggatattcacggctttgtttctgcttgatgtgaagcttgcgtttgtatgtctggcaattgtgccgattatctggctgtggtcagtcatataccggagatatgcgtcatattacaaccaaaaaatccgctcgatcaacagtgacattaacgcaaaaatgaatgagtcaattcaaggcatgaccattattcaggctttccgccatcaaaaggaaacaatgagagaatttgaggaattaaatgaatcacatttttatttccaaaacaggatgctgaatttaaactccttaatgtcccataatttggtcaatgtcatccgcaatcttgcgttcgtctgtctgatctggcattttggcggtgcgagcctgaatgcggcggggattgtttctatcggtgtgctgtacgcgtttgtcgattatttgaaccggttatttcagccgatcacaggcatcgtcaatcagttttcaaagctggagcttgcaagggtctccgccgggcgtgtttttgaactgcttgaagaaaagaatacggaagaagcgggtgaaccggcgaaggagcgcgcgctggggcgggttgaatttcgtgatgtgtcatttgcgtatcaagaaggtgaagaggtattaaagcatatttcctttactgcgcaaaaaggcgaaaccgtagcgctcgtcggccataccggatcaggaaaaagctcgattttgaatcttctgtttcgtttttatgatgcgcaaaaaggtgatgtcttaattgatggaaaaagcatttacaacatgtcaagacaggaactcagatcccatatgggtattgtgcttcaggacccgtacttattctcgggcacaatcggatctaacgtaagtctggatgacgaaagaatgactgaagaagaaataaaaaatgcactgcggcaagtcggtgctgagcctcttcttaagaagcttccgaagggcattaatgagcccgtgattgaaaaaggcagcacgctatcctctggagagcggcagttaatttctttcgctagagctttggcgtttgatcccgcgatcttgattttagatgaggcaacggcgcatattgatacagagacagaggccgtgatccagaaggcgcttgatgtcgtcaaacaaggacgcaccaccttcgtcatcgctcaccggctttcaacaatcagaaatgctgatcagattttggttcttgataaaggagaaattgttgagagagggaaccacgaggaactgatggcattagaaggccaatattatcaaatgtatgaactgcaaaagggacagaaacattccattgcataacgctcaaaaacccaaaacaatcgtgttttgggtttttggtttatgtagtcaataagccagtccgacacggtttccgacatactcacctgtaacgagctcacgatataaaaagtccgcagtatcgccgaccgaaatgcttgtgccgccctcaggcaaaacgttacgctccgtacgataaacgccggttgctgttccgtccgggaggtaagtggggcagatgattgtccagtctaatgatgattctttaagcatttcgtatacttttgcatgctccttggctgcgcgggtctgctttcgtttcgattcatttgtttcaaaccggtattttcccggttcatatcgggaatctaggatccctgcggtgccgatcgtaataagccgtttgatatgctgttcctccataacggagagaatgtgtgccatagcagttgacaaggtatcatcaccatctgtgcctagacagctgatcacgatttcagcattctccattatttttttcacatcttctaagcggcgggcgttccccatgacggttctgtcttttgaaaggggaagatcagcatgttgagatctgatcagagcgaaaatatcaaatctttcatctgctgcagcttgtgttaaaaaggcttgtccgacgcggccgctggctcctaataaagcgattttcattaaaaaacctcctcgcctttcattataaaaggatgttctcagtttgaacagcgcgggaaagaatacctgtacaaataaacagaacgatgggaaacatattcatgaatcatggatacacttacgaattgaaccagctcccaattcacaatggtgatgaatgacaccccgattccctccctttttttctaggatatgtggagcaggaaaaaagggtgacaaaataaagagagcgcggaaaccgcgccctctatagccatatattgaattgttattgaactctgccgcccatttgctgctgagcgaaagatactaaacgttttgtgatttctcctccgacagaaccgttagcgcgagaagttgtgtccgctccaaggttaacgccgaattcagaagcgatttcaagtttcatttgatcgatagcctgagctgcgccaggaactagtaagtcatttgaagagttttggttagccatgtgtaaaatctcctttttatttagtatggttgggttaactggagttgcaccaatctgtgaacccttctcgggtgtcactgccgcctcggcgtaacccaatgctttgccggcttgttactacgtattatgttaaaatggccggaaaatcatgcggagaattgtgtggtaaatcttgagaaataaaaaaagcttagccgtttaggctaagctagtcataaatatgaaaaagcatcagttcatgtatctcgtttgtaagagcaggctcgtcagcgcgggcgggaaacaagtctccccattcaatctcaccgctcttatgatagatgccttcataatgggtccctttataataaaatgaaattttccatccgggcagcttttcttttgggaacaaaggtttccagctgaaatgagaaatcattacggccacgctccttacatttggtatcaattgacctaaataaaaacggcttatgttcattgtatcattgtttcagaacatcattgaagaggcctaaatatgcagtttgtcccagctttggataaagataagcccgctttattaaaaaagcggacaggttacgaaggccacaatgcttccggagatgtgattgccttctcagataaatatgacgcgtattcaaaacttcttcgttttgtaagagaatcaacatgatgcaaatttggatgagaaaaaatgcttcggcccgggcgcgaattcgcttcaaacatccatactttaccgttctgatcaatgccaaaatcgaaaccaatctccccgataaatccctcgatatgatcatgaaggacatggcttgcagtcagtgccgctgcagaaagctttttaatgacctcaactctttcagcgggatcatcgtatacttccgcaagtgtctttacagtgccgccgttagaaagatgtgttgtaatgctgttctttccggaaatttttacggcgattgctgtcactgtccattttccttttctgtttttattggtatggacacggaaatccgctggtttgccttgaaattcgatgagatcaacaccttgctgaatgagaaagtcggacgggttgtgatgtttttgaaattctgcaaggaatgaggcggcatcggaataatcaattgatgtaaaagttttggcgtcattcgtatgctttaccgtcaggccgccatctgttcttgtcagctgataaatgccggtgccgagtgctccatttgccggtttgatatagacttttttgtatgcgccacagagctcatcaatcagctccacagacggtgtcagctcggatctaggcaaaaagggtgccgttctcggatctttttcgagcaattgatgaacgttccatttattgaaaaacgttttattaaaccatgggatctgatattcatcgatcagcctcttttttgtatgttgcaagagaagtgaatcttcaatttttcggttcggcaaacggtcataaacgacgttcggcaatggaacgatttttttctcccagccgttttccctgtaaaggaggccttcaatcgtgccttcctcccaattgatttggtgcgcgccaaaaacgaagcagtagcccccggcttgctcgtgtaacgtgacaagtttagaaaaaaagagggaacgatccttaaatggacgttcaagagatacagtaaaccctgccgtaaagatgccgactaacggcccgatatgcactgtatgatcatgaatcagtatatcagccctgcttcggtggggaagcaaaagctcatgaaacagattttcagagagaagcacggtttgttccagatgccgtctgtaagcaacgtggcatctgacaaccttcgttccgaatgcggcatgcaaaagtccgtctcgcttcagcgaagagggcagaaacagggtattttcactggttttgtctatgccgatcaaaaaccgtttaggattcacgcggaagaactcctttctggctttgctcagaaaacagatattggcagcgctttaggggacaagtgtacagctgttctttttgctcgggagagacacgcaggattgactttctgcctggtttggaattgatatctaaaatccaaattctcccgtccttagcaagacatatatcaagaccgagttcaaacaacggcccatagcgctcgtcaagataatacggaaccgattgggtaatcgaaaacacatcatctagtaagaccacttgctgttttttcggtatatcttcaaaccaggagtcaaatgtcagcgcatcagatccgcctgacaaattggccagcagcccgtgtttgtatccgcgtcttactgcctttccgactgtattccattcacctgcttcgtttttttccataaacaggcgaatatcacaagggtattgttccttatcttgaatgtttaagtaaggctgaagcaaatattgatgctgaagcacttttttgcaccatgttttaaaagaagtctggttggaaaacgtttttgtctgcttatcctttccgatgtgataagtagcagtgatgtttttcttgcccagcttcaaaagaatcacgcctctgcctcccgcgccaaatgccggtttaaggatgcaggctttttctttggataaaaaggagtgaatttgttcgtagcggctcacctttatcgtttcgggaatatagggattgattacagagtgctgctgcaaatcgtgaaggacggtccacttatcgggaagaccccgcccgataaattccgttttcggatattttttgagccactcaacgattggttttgctttttgggaatgtgaatccttgccgtaaaaacagcgatcataaatataatctggaatcgccatttcagtttcgttccatgtgctgctggccgaatgatagaccgatgctttgacacgcaaagtgtcaggtgaaatatcaaatggtgtaaaccggatgaaacgtatgccgaattcgggtgctcttttggccagttctgcggaataatccgcttcatgctggcgggataaggacataaaaccgagtgttatcatggtgagactcccccttttattcaaaagctgccggcgggtgtccgcagctttacactaaatacatgtaagacgaacgcagctgacggtattctactttacagaatacgattctccaccttgccctattccaaaagaacaagctgattttctaagaacaggaatttgtctcctcgtttgctaagtgattgcatgagcctctataatacgtataggtacataatctatatgaaaaaagctgaagcacagatggaggaagatgaataggaatgggtattgcaggaacctttatttttatgatcgtgatcggcgctgccattggagcggtgaccaatcatttagcaattcaaatgctgtttaggccgtataaagcgtactatttgtttgggaaacgagttccttttacgcccgggctgattccaagacggcgagatgaacttgcaaaacaaatgggactgatggtagtcaatcatctcttaacccctgaaggcattaaaaagcggctcgtctctgatgcagccaaaacgcaggctcttcgagtgggggaacagctgattcaaaagctgtcactttctgaagtgacagtaaaagaagcgcttgaaaaagccgggatgaagcgcccagaaaaagctgctgatgcatggatcagcagctggaccgatgataagctgaatgagcttttccgccaatacggggaccaatcgttaaaagagctggtgcctatagaggtgcaggaaaagcttgaggaaaaaattccgatgatttcaggatatatattgtcacggagtgtcagttattttgaaagtgatgaaggaaaaatccgtcttggcaatatgattgatgactttttaaaagagcgcggcatgcttggaagcatggtgcaaatgtttcttggcaattcaagccttgcggatcgcgtgctgccggagctgctgaaattcttgcgcaatgaggaaacaaataaattgctttctgatctcttaaaaaacgaatggggcaagctgagggagtatacgtttaatgaagcagatgaaaaatggaatgcaaaggcgctcattttcagtttgaaacgaagagtgctgcaagcattttcgactgcccctttcttcgacaatacgattggcacgcttaccgtccgctatgaatctgagctgacccagcaaatgctgccggcactgttagacaaattgcttgaagggatttcgtccaaccttgaaagtgtcttaaaacggttgcgtcttgaggaaatcgtcaaggagcaggtggatcagttcccggtggagcgtcttgaagaaatggtgctgtccatttcaaaaaaagaatttaaaatgattacctatttgggggccttctcggcggaattataggcgcgattcaagcattgtttgtcatccttttttaagaagaaatggtttttgattaatgaaaggagctccatagtctgttatagtggagtggtatgtcaaacggcaatgatgaaaggagctatttacaatggctgttaatttttatgatgtagcgtatgatctggaaaatgcattacgcgggagcgaagagttcacccgtttaaaaaacctttacgacgaagttaacgcagatgaatcagcgaagcgcatgttcgaaaacttccgtgatgtacagcttagactccagcaaaaacaaatggcaggagaagagattacacaagaagaagtgacgcaggctcaaaaaacagttgcgcttgtacagcagcacgaaaaaatttctcagctgatggaagcggagcagcgcatgagcatgctgattggtgaattgaacaaaatcattatgaagcctttagaagagctttacggcagtgttgaaggctaataagcaaaatcccttcttggataagaagggattttttattcattcagcaaacttggaaatccaatgaatcttttacctctccattgatgatcactgataatgtatgaattcctttgtaatgctttctggtggttaaatccttaaaggattggtttcttgtgtatgacttcgtttcgttttttcgtatagttgtttctgttattttaaatactttctgatgacgctggcctcttgcttttacaaaatcaattgcgtactcaattcttactttttgatccctgtctgaatgaatatagaaagaaaattcaaggctttcgccaataactatacgtttgggctggcctgttaaatcatgtagttgtatcgaatcagcattttcataaccaaaaagcgctaaggcctgtttatcacccttttttaataaggtccgataggcgtgtttgataatccagtctgtatggggatgtgttccgtaccattgatctgcgacttttctcagtaaatgaggatgcgtttttgatatatcattaaggttgttggccacgctttttcttacatataaggactcgtcctgcatcagcttctcaaggatcggcaatacgggggaagggtccgatttcaaagccggtatcgattttccccatggcaggcggggcctgctgccttcgctcgcaagtcttctcacgtgttcatttttatgctcagaccatgcaagcaattgtgcaaccatcttttcttgatctaacagcaaaaaaggccttacagcaaattctgaggtcgaatattgcgtaaagtattccaatgcctttattgattcttcccaatgcgctaacccgtactgttccacataatctggaaataaaattccgctgagtcctttaaaatgaggggctgtatcccgtaaaattgtgagcgcttcaacgtattgttttggcaaagtttcgtataaagaaactgtcacgcggcgcatccgctcttttaaagtgagttcaggccagtcctccagccgtaatgtatcctcgaatctgtctttgttaaaatcaggataggatgaccttacatgatggatcaactgagatatcagttcttcattatatatttcttttaaatcagccatataaacaccgctttttcgtttattatttatattgtatgggaatgtacgttctggatcaagtgtatagtcctaaaaattaacaactgatcctaccacggatatacaaaagttggttactttttttagttaaaaaaacccttgtcatcggaaaagaaaactgagataataacattgaaagcgcctacacttacctatttcaaatggatacggtcgcatatcatgccgttatatagaggggataagcaacagagagtaagtgttcggagcgcatcattggtcaaacaaggggttcctgatacatgatttttcgtaaatcgaaataacgatattagggagaatggctgcttcgatcgtatcctatcaacaagccatacataaagtctgctgagccaggctttttttgctttaagaaaaggttgttctaaacacagagacagggtcatatcctatacacaagtacagtcatcaaggagggggacatctctgtgtcaaaacaattgcttgccttaaatatagatggagcgctgcttcggtcgaacgggaagattcatcaggcaacgaaagacgcgattgaatatgtaaagaaaaaagggatttacgtcacacttgtgaccaaccgtcattttcgctcagcacagaaaatagcgaaatcgctaaagcttgatgccaagctgatcacccatagcggggcatatatcgctgagaaaattgacgccccgttttttgaaaaaagaatttctgatgatcatacctttaacattgttcaagtgctggagagctatcaatgtaatattcggcttcttcacgaaaagtattccatcggaaacaagaaaaaggtgaattcgaatttattggggaaagcactcattcatccgtctgacccgatcttttatccagtccagttcgttgaatcattaagcgatctcctcatggatgagccggtgagtgcacccgtcatcgaggtgtacacggagcacgacattcagcatgacattacagaaacgattacaaaagccttccctgcagtggatgtgattcgcgtaaacgatgagaagctgaatatcgtcccgaaaggtgtctcgaaggaagcgggtttggccctcgtcgcttcagagctgggcctgagtatggatgatgtcgtggccattgggcatcagtatgacgatctgccgatgatcgaacttgccggtcttggggtagcgatggggaatgccgttccggaaattaagagaaaggcagattgggttacaaggtccaatgacgagcaaggtgtcgcttatatgatgaaggaatatttccgaatgcagcagcgaaaaggatttcttgataagttccacatgaaacgtgtgtaaaaaagccgctcgcaccctgacaggtgcggcggcttttttgccggattgattttagcagtttatttctgtacactaaagaaagttttgaatctgataaattaggtgatgaagttgcaaattaaaatagaaggcatacatgatgaccgcctgcatcggcctctgcaaaatattgcaaatttgttttatgaagagtgcgagcttgcgtatggcggagaggagcccgcagattttgtcatttctttagcgttgtcacaaacggatgagcatgtgacggtttcgggagaagtgaagggaactggcataaaggaacagcatacaaaattcttttctcccggcatgaatgaaaaagaagcttttaagcaagtgaaaaacacaatttcttatgtgtatctcaatcttcttcaggcgcatacgggcattacgcagaagtggggaatcctcacaggaatccggcccacaaagctgcttcataaaaaactgcaaagcggaatgtccaaggagcaagcgcatgctgagttgaaaaaagactatttaattcatgatgaaaaaatcatgctaatgcaggaaattgttgaccgtcagctggcggcagttccggatttgtaccgagtaaaggatgaagtcagcatttatatcggcattccgttctgcccgacaaaatgcgcgtattgcacattccctgcgtacgctatccaaggacaggcgggcagagtcggctcattcctatggggactgcattacgaaatgcagaaaatcggtgaatggctgaaggagcatgatgttaaggttacaaccatttactttggcggcgggacgccgacaagcattacagcggaggagatggatctgctgtatgaagaaatggtccgctccttcccggatgtgaaaaacattcgtgagattacggtggaggccggtcgtcctgacacgattacagaagaaaaactcgccgttttaaacaaatatgacattgatcggatcagcatcaatccgcaatcctacgaaaacgaaacgctaaaggcgatcgggcggcaccatacggttgaagagaccattgagaaatatcatctgtcacgccagcatggcatgaataatatcaacatggacttgattattggtttgcctggggaaggcgtgaaggagttcaggcacagtctttcagaaacagaaaaactgatgccggaatcccttaccgttcatactctttcatttaaacgggcgtcagaaatgacgagaaacaagcataagtacaaagttgccggcagggaagaggtttctcaaatgatggaagacgcggtagcctggacgaaagagcatgggtacgtgccttattatttataccgccagaaaaacattcttggaaaccttgaaaacgtcggatactctttgccgggacaagaaagcatctacaacattatgattatggaagaggtgcagacgattattggcatcggctgcggcgctgctagtaaatttattgatcgggatacagggaaaattacgcattttgcgaatccgaaagatccgaaatcgtacaatgagcgcttcgagcactacacggacgaaaaaatcaaatatttagagcagatttttgaaaaaacgacaaagcagcactgatcacagtgctgctttttttatccctgtttttttgcgggctgaacctcaggcttccatttaaataccttgttaagcaagcggtaaattcgttttgattcctttgtgacaagcggtcccaaaatcgccagaatgaggacatataatgcggcaaacggctttaatgtggccgacagtccgccggctatcccgagattcgcaacgataatcgaaaattctccccgcgatacgatcgtcagcccgatattcgatgaagccttatgagaaagccctgcgcgtcgtcctgccaccattccggcgataaaatttcccagaatggtcaaaatcactgcacccaacgcaagccaaaccgcttcacctagcgaaaacggatcgatactgaggccgaagctgaaaaagaacatcgcaccgaagaagtcgcgaaacggaacaacgaggtgttcaatcctatcggaatgctctgtttctgaaaagaccaaaccgagcagcagcgcgccgattgcttctgctacatgaatcgtctcggaaaacccggcgataaaaaagagcgctgcgaaaatgacgataataaacacttcgtttgagcgaatgtccaacagtttgttcaacagcggcgggagttttcttgctgcgataaaaaacagcagcatataaccgaaggcgatcaaaatggacaagagtgcactccctacggatgtcgcatcacctagtataaggccggaaacaacggacagatatacggcaaggaaaatatcttcaaacatgatgatgccgagaatcaattcggtttccggattggcggttctttttaaatcaacgagcacttttgcgacaatcgcacttgacgagattgtgatgacgcctgcgaggatgaggacttccagaaaggaaaatccggtgataaacccgtaaagcagtccgaggctgaagttaatcaaaatataaatcgtcccgccgaccgcgattgattttcctgatttgattaacttcccgacagagaattcgagtccgagatagaagaggaggaacagtacgcccattcgcccgaaaaactcgatgatttcactgctttgaataaatgttagatcaataatccccattttcggcgcgtgcggtccaacaagcattcccagcacaatcagaaacggaataatcgaaaatttaattttattggcgatcacactggcgattgccacaagcacaagtgcagttccgacttcaaatacaagatggtccatcggggctcacacgccctctccagaaagaaaatcgtgaatcagtttcttcagatgctttctctcacctgagaggacaagggtgtcattttcttcaataatcgaatccgctccgggatttaggagcttttcctggttgtgtttgataatcgcaataacagtgacatcgtaattctggcgaacatcaagctcaccgagtgtgcgtccgatcgatttggcgcctttttcgaccttaaaccattcaataataagatcgctgaaggccatttcgatggactccagagcttgcggtttatagaccatgcccccgagaatagctgcaatttgccttgcttcagaatcatccaatgaaatatttgaaagaagctcatccgggtcccggtcattaaaccggtaaatttcccttcttccgtcatcatgaatgataatcgtcattttttcgtggcttcttgtttcgatttcaaactttttgccgatgcccggcagatcgttttctttaatattcaatgaaaatccctccgaatgtagtgttggcagtatggggtgagttacaaataaaacttgagcaaattatattcggaggtaattagactggtatttgacagggacggcacaagccttttccagcctgtttatcagcggttcgtcaagtggtttgacagagagatgcctgacagactgtgccagcgggctgtactctttgatcagctcagccgggtgaatgctgcccggcgacggcgtttttgccgattgtgtttcctgcggatatgaggacataggcacatagctgtcagtgcttgcttcaaactgggaaggcagaaccacgtccgaagggggaaagtacaccataaataaacttaacagaaaactgatcagcaatttatccatgtcctttcctcccttctcatcaagatatcccttctttttcactatataaaactttatgtttccattcaaacaatatgcatttttcagtatctattgaccttgaaaaataaaaaggtttatttggggatggcggggaatgtataggagaaagaaaaaagtaagcgcatacatggaggtgcttttaatggagtttgttcaatatgcatgtaatggggccgttgcagagattatcctgaatcggcctgatgcccatcacgccctgaatgaacagatgctgtctgaattgaaggaggcagtcgaaatggcggctgcaagcgaggcgctcatcgttctcctgagaggaagcgggaaaggcttttcggccggcggtgatatcaggatgatgacgtcagagcatgaccctgaccaatttaaacggctgatggatacgattgaggctgtcaccctgaatttatatcagatgaagaaagtgacaattgcagccattcatggtgctgctgcgggactgggcctgagtttggcgctttgtacggacattgtgctcgctgaaaaaaacgccgttctcgcgatgaattttatcggcattgggcttgttccggacggcggaggacattatttgctgaagaaaagaatcggtgaagcaaaagcgaaaaaactgatttggagcggaaaaaaactatctgcctcggaagctgccgatatggggcttcttgatgggacatttgccggagaccctgccgaaggcgcaagacccattatcgaaaccctgttggcctcccctcttttggcgatgatcgaaacgaaaggtatttttcaaagcctccaaattgaagaactgaaaaaagtgctatcccttgagcgcagcgcccaagagagaatgagaaggaccaaggatcaccaagaaggaatccgtgcctttttagaaaaacgggagccgaagtttcaagcgtaacagatcagccggaaagctgatcatctgtgaaacaaaatcagctttccggctgcattgactaaacgatgagtatgactatgaagctctttttcttttaagagggcttcaccatgcgtttttgccgcttcttcatgttctgcctcgaattgctcgtttaccagcgtgttccccgaaggatcaaatacggtaaggaaataatcagccatcaggtttctcctccattttaaggtttatcagtctttcttcatttatattctaaaaaggaaatcaaaatcctttattatgctttatccaaaattagtatataatgggtcagggaaggaggagattcagtgcttacaattgatcacgtaacgaagacatttggagattataaagccgttgacggattggacttagatattccggaacagcaaatgttcggtctattaggcgcaaacggagcgggaaaaacaacaacgtttcgcatgatcctaggattattaagcattacggagggctcaatcagctggaagggccgtcctgtgaattatcatatcagcaacaaaatcggttatttgccggaagagcggggcctttatccgaaaatgaaggtaagggatcagctcgtctatcttgccagattaaaagggatggagaagcgagaggctgtaaaagagctcgggacatggcttgaacgcttcaatattacagattacgagaataagaaggtggaagagctttcgaaggggaatcagcagaaaatccaattcatttcggcagttttgcataagccggagctcctgattcttgatgaaccattcagcggcttggaccctgtcaatgttgagctgctaaaagaggccgtgatctcgctgaaaaacagcggtgtttctattttattttcaagccatcggatggaacatgtggaggagctttgtgagaacctttgcatattgcagaaaggaaaaccggttgtacaaggcaagctgaaggagatcaagcgttctttcggtaaaaagaatgttaccattcactccgatgacgatctgcgctttttgcagtcccatgaaggcattcttcaatggaaggaaacggcagacggcgtcaagctgcagattgccaatgaagacatttctcaagagatttttgcgatgctacagggaaaagggtttatcagaaagtttgagcttgaagagccgtcactgcatgatatttttatagaaaaggtgggggccgtctatgaataaattttggatcatgctttctcatacatacaaaaataagattatggcaaaatcctttattatttcgactgtcatcacggtgctgcttgttttagttgtaacgaatctggagtcgatcatttctttgtttcaaggtgacgatgcgaaagaaaaaatcgccgttgttgatgaaacaaacgaattatatccggttttttcaaagcagctgaaagcggtggatactgacggcgatcttgatgtgaaactgtcgaagcaatcggaggatgaggtcacaaagcaagtcaaagatgaatcactcgatggcatgctcatcatcaaacgagatgaaaaagggaccatttcaggaacatataaagcgttaacgatttctgatgaaagcacgtatcaaacactgcagcaggcgctgacgcaaaccaaaacagctgtcggaacagcggagctcggcgtgtcgcaggaaacgatcagcagcctttatgcgcctgttactgtggggcagaaggcgctgaaagaaggggcaaagtctgaggaagagcttggccagacggtagggcttgtttacattatgctgttcgtcatttatttctcggtgattatgtatgccagcatgatagcgatggaggtcgcaaccgaaaaatcttcgcgagttatggaaatcctgatctcaagtatgccgccgatccagcaaatgtttgcaaagctgcttggtatcgggcttgtcgggatcacacagcttgctattattataggagccggctctctgtcgcttaagctgaaccaaaagagcgaaacggcttcatctgtcggcggattccttaatttgaccaacgtatctgcaaccactgtcatctatgctgtcattttctttttgctcggatactttttgtacgcgacacttgccgcgtttcttggcagtgtcgtcagcagaatagaggacgtgcagcaaacgatcacgccgatgacgcttttggttgtcgccggttttatgatcgcgatgttcggtttgaatgcgcctgacgcaggatttattacggtaacttcgtttattccgttctttacgccaatgattatgttcctgcgcgtcggcatgcttgatattccgttctggcaggcggctgtcggaatcggaatcacactgctcaccattgtcatactggccgttatcggcgccagaatttataaaggcggtgtattaatttacggcaattcaagcgcgttcaaagcgatcaaacaagcgctacgtttagcgaaaaactgattggaaaacagcctggggattctcaggctgtttcttttttgacagaacgtgcattcgcaagaattcggtgctaaaataagggtacttcatcctggaaaggagcagaatgttgactgatctaacctttattcatgcggcagatcttcatcttgacagcccgttttacgggatatcgcacctgccggagccgatttttgcccggattaaagaaagcacgtttgcaagcgtgagacatatgatagacgccgcagtgagagagcacgttgatttcattttgctggcgggagatctgtttgatgaagccaatcgaagcttaaaggctcagctctttttgaaaaaacagtttgaaagactcagagagtgcggaatttcggtatatgtcatctttgggaatcacgatcatcttggcggggagtggacgccgattgaatggcctgagaatgtccatattttttcgtccgctgttccagaagaaaaatcatttttaaaagaaggcaggcgcatagcaagcatttacggcttcagctatcaagctagagcagtgacggaaaaccaagccgcccgctatcggagatcaactgacgcaccgtttcatatcggcatgctccacggcacgctctcaggatctgaaggacacgatccgtattgcccgtttacccatgacgatctcgtgaaaagcgggatggattattgggcgcttggccatatacataaacgccaggttctatctgcagagcatccggcagtcatttacccgggaaacacgcaagcacgccatatgaaggagacgggagataaaggctattatctcgttcatgtgacaaacggagatatatcttatgaatttcagagagcgcatgatgtcctgtgggaaaaagcggcggttgatgtgacggaggcaaataatatgaccgctctcttccaaatggtggaggacacgttttcgaagctgcggaaaaaggggagccctgtttgtgtaaggcttgttttacaagggacggcgccggaatggctgctggaggcgccaaaaggcaccttggatgagtttcttgaagctcttcaggaacaagaagcggaagaggaacatttcgtttggcctcttggattggacgatgagacagaaaacgaagcaaacctaacaaaccttgatcctttttttggcggtttatttgaagacattgatcgcagcgatctgtcagacgtgctggaagggcttgagcggcatccagtgtatagaaggcacgcggaccggtttagccaagaggaggtaaaggaaataaaagagcaggcacagatattattgaaaagacagcttaaggtgcttgatacatgaggcggtgacagctttgcgaattatatctttacatatctaccaatacggaaaattttccaatcggacctttgacttttccgcctctcctgtccaagtcatctacggattaaatgaggcaggaaaaacgacgatgatgtcattcattgaaagcatgctgttcggttttccgaaaacgaaaaagtatgaaccgaaaacaggcggtgtctacggcggtgttcttgaagctgaacatcctgagtatggggtgctgaagatcgaacggacgaaagggactgccgaaaaactaagcgtgtacacagaaaagggcgaagtaaagcagggagatgttttaaagcagctgttccagggcacagacaggtcgttgtacaaagccatatattcgttcgacgtattcgggctgcaggaaattcacgcctttaatcgggacaagataggggaatttttgctcttttccagcttgtttggtgctgaagccgtatcaaagcttgattcaaggctgacgaaggaaagcgaaaggctctataaaccaaatgggcgaaaccctcaattgaatcaggagctggaaacgcttaagcagctggcagttaagctaaaacaggctgaagcagaggaagcgggctatcatcagcttctcgaggaaaaacgaacgcttgaagcccgccttgcagccgcggaaaccgaattgaaagagacggcgggacatatccgaatgattgagggagcgattgagcgaaagccgctgctaaatgaaaaagcgacactcgaacaggtgattgcagaatttccggaacacgcaggacaatttcctgctgacggactgcatcagctggaaaaatatgaatcccatcttcacccgaaatcagcacagcttgaggcgcttcgggtgaagatggcggagttggacaaacagaggcaaaagcttatccccgataaagaactattggcgaaagaaacgctgatacaagagctttcggcagcgtttcatatgtaccaatcctggggagaacagctggcagccattcaggcacagctgcgccagacgtctgcgcagacagcggcagggctggaacagctcaataaaacggatgaaaatgagctcctgaatatgaacacctcatatgattatgaatggcagcttcagcaagcggtgcagcaatatgtacaggcaagagacagaaaacggcagcttgacgagacgtttgaacttgcccggcaagagctggaagacgcggaaaaggccgttcgtgccgcttcgtccgcgattcttgaaaacagccaaagaaaagataaagaagcagctcttagagcatatgatgaaacacaggggcagcaccaagagcaagcgaagctcagagaacagctaacgttttttgaaagacagcaggctaaacagaaaaagactgtcattgcagctggtatgttgttcatcgttctcttttctctgctgcagcaatggattcccgccataagtttcggcgctgcacttattgtgtattggcttgtttcaggaaagtcgtcttctcgaaacagccgagagacaagacagcccatgacggatatttcaccagcagaagctgaaatgcttagagaagcgttatgggaggatgaccgcaataagcagcaccttctcacacagcgtgcagcgctccagcaaaaagaggcggcgtatgaaagggtcatccagcagtttgaacagtgggaagccgaaatggcgccgtcctttacacaggttgagcgttttatgaatgagctcggatttaaggaagatccatcatttttgcttgatgcatacagcttaatgaaggatgttaaaaaagaagtgaagaaaaagcatgagctgaccatagaagcaggcaggctgaaaaagcaccggagaacattcgaagaacgcgtcagtatgcttcttcccgtgaatcagagtcaggatatctccatttcggacgcccttcacacattgcggaaaaacattgaacgtgaaaaagaaattgagaagcaaaaaaaggaaattgaaacagatattcattatacaaaggaacagatgcttgaacttgagcaagaaatacagtatttccacgcacagattgaacagttatttgccgcggctgctgcaaaagacagagatgcgttttttgccatagccgacatcagcaggcaattgaagggtacggagaacaagcttcatcacgtaaacgcacagcttcaaggcgggtacccggaggaacttgaactggcggattccaatacgctttctgaattgaaagataagcaatttgttgagaatgaaagaaaagagcggctgactgaggagatcgagcagctccgcagccaaatcgcactgctctcagtcaaacaggaacaattagaggcttcgggaatggtctcagacctcaagcttcaaaccgaaatgcaaaaagaacgtgtgaaagaaacggctaaaaaatgggcctccatacaaatggtcagacaggtgatcagaaacaaattggagcggcataaaaaaatcgagcttccgcgccttctagagacggcaggagaatttttccgccctctgactgacggaaactaccaaaccatttatttttccgaaacggatgattcgatcatggttatgcatcgcgatggaactgtctatcatgcggaagagctgtcacaagggacatgtgaacagctgtatacagcgatccgatttgctttggccgttacgcgccagggtgggtcaaagcttccgttccagcttgacgacagttttgttcattttgatcaggaaaggctgaaacgtgtattacatgttctgtatgatttatctgaaggcggtaggcagattttgtattttacatgccatgagcacgtaaaagatgcatttcatagcagccaaatcatccatttggtgtcataaaagaggttctatagctgaaaatcggtatgtgatatactggtattatgtaagatacggagggagctttaatagaatggctaaagggattatgctacatgaggttggcgaacaggtggaccagtatctattgattaaatcctcgacgaaagggattgcaagcaatggaaaaccgtttttgacgctgatgctgcaagaccagtcaggcgatattgaagcgaagctgtgggatgccaagcaaagtgatgaagtgacctatgcgccacagacgattgtcaaggtcgtcggcgatgttcaccattatcgcggacgcacccagctgaagctgagaaatatcagaccggtaagcgagcaagaaaacgtcaatattgatgattttttagaaaccgcgccgattccgaaaaatgaaatgatggacaccatcactcaatatatatttgaaatgaaaaatccgaatatccagcgaatcacaaggtttttggttaaaaaacacgaagctgagtttatggattatccggcggctacgaaaaaccaccatgagtttgtctcaggtttggcgtatcatgttgtctctatgctgaacctggcgaaagcaatagcagatttatatccgtctcttgatcgtgatctgctttacgccggtgttatcctgcatgatcttggaaaagtgaaggagctgtccggccctgtttccacttcgtacacggttgaaggcaatttgctcggccatatttcaatcatggtgacagagctttcaaaagcggctgaggagcttcaaatcgattctgaagaggtgttaattcttcagcatttgattttgagtcaccatggcaaagcagaatggggcagcccgaaaccgccgatggtgaaagaagcggaaattcttcactatatagacaatctggatgcaaaaatgaatatgatggacagagcgcttgagcgcgtgaagcctggcgagtatactgaacgtgtatttgcactggaaaaccgttccttttataaaccgacatttcataaataacttaaaaaggactgatgctgacatattcagctcagttctttttgatgcgtctttcccgcacataactcgtctcattcccgcatatggttaagaataaagaatctatgcaaagggggaggagcccgtgttattttttccgtggtgggtgtatctttgtattgtaggcattattttcagcgcatataaacttgtgacggcagccaaagaggaagaaaaagtagaccaggcttttattgaaaaagaagggcagatttatatggagaggatggaaaaggagcgagaacgccgcagttctcagcagcatgaagaagaaaatcaaaaccattccatcgcataaaaaaagctgtgcggctcaatgagcctgcacagcttttttattatttagaattgcttgaagatgaagaagtgctgttacttgttgaagatgtattaaatgtgtctttcagatctttatcttttacttcgatgtcagccttcttcatgactttttgaacagcttcctgaacggcattgctgtcatttagtttttgttcaagcacttcagatttcagttcttttttcatatcttcatattttccgcgttcttcagtctttttgatgatatggtagccaaattgtgttttcacaggattgctgacttcatttgttttcaacttgaatgcagcttttctgaatgtggaatccagttgttcgttatcttttgaaatccagccaagttcgccaccgtttgtagcagtggagtctgttgagtattctttcgcaagatcttcaaacttttcgccttttttcagctttttctctacttcttcagctgtctttttatcagcgacaacgatatggcttgcgcgaatctggccttttaagccttcccagtattctttaatttcatcatctgtaactttgatgttatctttagccgctttttgtgtcagcaattcatattttacttgttctttcaggtaatctttgccatattgcttttcgagggcagtatattgatcgccaagctgcgttttatattctttcagcttgttgtcaatttctttatccgaaactttatacttcttgtccaatactttttcttgcactagctgtgtcagtacgcttgcgccagctgttttcttcatgtttgtgtaaagctcgccttttgtgacatcgcctgcgtctgtttttgcgataacttctttgtcgccgctgctgcaagcactgagagcgaggatgcttgtagcagtgatagctgctattgcgattttcttcattgttttcaaacactcctaatcattccaaattaaattacctatgcgtatcataacatattgtggctttctgtaaaaagattttaaataaagggcattcgtctagtcaaacttttgctgatgacatacttatatattgatcaagaaaaggaggtatgtaacatgagcggaggatactctaacggattcgcgttgctcgtagtactgttcattttgcttatcatcgtaggtgcagcttacatctactaagcagcccgaggatcgcttgcaacataagcgatcctttattttcactagcgcctaatcgtttcaaacatgaattgcataacatgtaattggtaaataaagcttattacaggaggtgctttttaagatgggtgaagtatttgcaggcggattcgctttattggttgtgttatttattttattgattatcatcggcgcttcttggctgtactaatcaacataaaaaagcatagctgcttaatcagcagctatgctttctttcgtatttacactgtaaaggagatctccacaaacgaagagatcagtaaaattaatatagatacattaataaatcggaataccttatcttgccgctcttcaggaatctctctgacaaggcataatgtattggtgagcctgtttatgaaatataaaataaacacggcagccacgataaaatagaataaaatgatgggagattccccctctctctgaactgtcccatattacattaccaaatatttattaaaaaagatagaatgcaaattgaaaaatcgccaccagcaccagggtttgactacttttcaacaagaatatccaagccgtcagcttcctgatcaataaaagcggttttcggtgcttttatcagcttgagagccagcaggaaatcaggcagacagtagccggcgtgaatgcccgagatcatgcagaaataatgagcgtgattcggaaatgccagtgctgcgtaaaacaataccggtgtaatcagcaagaacgggctgacgagtgaaatcagcattgttgtttttggtatacgtttccatgtgcgcatgcgcaatatggaaaactttttttctatttttctttttttgcagatgattggcaggacatggatgactttatgtgcaaataaaataacgacgagcaaaccgccgaataaagatacatattcatcgcttaagcttgtgccaggccgcagcagctcaaaagctaaaaaggtagatataaaaaccaaaatcataaaacatacagcagttaatattatgcgaacggcgccataatccttcatgagatttatggtcttccagcaattcatcaaagtcatccttccatacatcttgaatagaatctcaaaataatttactcctcccaagagaaaaaatcaatgcttttttaagaaaaaatatcatccggcaggtatttttttgaaacaagcaaacaaactgcgaaatatggggttagaactttcttctcagtgaattatcagctaaaataagattaaagatagaaagaagtggtgtggatggattcgatggatcatcgcattgagcgattagaatattacatacaattattagtgaaaacagtagatatggacaggtaccccttctatgcgcttctcattgataaagggctgagcaaggaagaaggggaagcggttatgaggatatgcgacgaattgtcggaagagctggcaacacaaaaagcgcaaggatttgtaacctttgataagctccttgcgctttttgccggacagctgaatgaaaaattagatgttcatgaaacgatttttgccctgtatgagcaggggctttatcaagagctgatggaagtctttatcgacatcatgaagcattttgattaactgtttacaggttcaagctcttcagccggttcatccgccgcactgtcctttgcttttttcttcagttttccgtttacgctttcaaagtcattgtcaatattggtgagtgacgtttcgaaaatttccataaaatcatcgccgtagatatggcgtatcatacacatcatttctgccacttcaggaaattttccgaataaatgatacaaaggctgtgaccctttaaaaacagcgttgcgtgtcggatcaaattcctcaagcaagctccagaatacctcggtaccttcctcagtcaattggacatatgtgttccgtttatcattcagccgtttggagaaccttaaatatccccgttcttccagcttttttgaaaagttgaatgcggttgatacgtgcatgaccccgaacttcgcgatttcagaaatggaagctccattcaattgatacgcaatccataaaatatgatgctcattaatattcaggtcatacggtttgagccattgctgccaatccttctcgatcgatttccaaagagctttgctaagctgagccattttctgggtgaaaaccagagcttctttcacatcatagggcggttccactcgattcattacgtcacctgcttctctttttctttttctctattatgccaataaaataaagattaataaagatgaaaatgtaagaattttttaataaattcacaaaccattgcgacgaaagggtttttcggccaaaaaaaaatacgggtccaattttggcccgcatttttttcttttgaataggatattagttttgtaaggttttctccagctgtctgattttctcttcgatatcggcaatttctttttgcagatcctgctggtgaggcttgatctcttcctgccattttttaattgacgtttggagctcgccgcccacgtctttaataacatccgtgctttcttttgccgctttgatcagctggtcttttaatgcaagcccgtctgactttaagcgtttgattgtttcttcaaaagaatcataattggttttcattttttcacgcagctgctttcctgaggaaggtgcagtaagaagaaccgctgctcctccgatgatgccgcctacgaatagtcctgttaatagagaacgtccgctcgccattacaatcaccccgtctttttcttcaaaataggattcattcagcatttttcatttttgttgaaagcctgaacttctatacatagcttgctttattttagcatattttttaagtgaaaaggagggagaaggttgtctgtctttttgattgtattatcctgcatcacccttgccttcgcttcaggcgctgtttactatatcaaacttctcagccaggctgcttcttatccgcccaagagggttatccggcagaaagcgcttgtttgttcaaccggaaccgcctttacactatgtcttatctttttcacaaaactcctcgcttaaaacatgctgacatgctgcgggcgctctgttcaaaaaaacctctcccggaagcggaagaggttttgtgtgacaattatttagcagcttccataaagcttgaacgccttaaaatggtttgcacaatcggataaataatgatcattgagattgtattcagcacagcggccggcagaacaacagccgcgaacaatgcggcgaaaccgcccggtaaaccgacgatcaataaagctgacgatagaaacacaattcctgataagatggtcccgatcactgtcagcacagcggctgcacctgttttccggctctttctgaacaagagaaacagggagaagaacagaaacgctgatacgggtttatcaatgatgttagggatctgtccggctggaaacgcggttgtaagcgcggaaatgattccggtcacgatcccgatgacgagtacattttgcacccgcgggaacagcagaatgcccatgaacatcatgatcagcatcatatctggtttcatgccgcctaaaaagggcggaataatggaatgaagcgctgcgccgatagcggcaaacagagccataatgactaactcttttgttttcatatctatgctctcctctgctaagcttttgccctccaataatatgctcatcatttattgcgaaggctttacagaatgtgttatgcaaacagtataccaaacgaacggtttgcatagccagactttttactcattttcctgctggaatttcttcatgaacgcagctaatttttcacagtcttcgagagagaccgcgttataaatagaagcgcggcagcctcccaccgaacggtgtccgccaaggccgatcatcttcgcatcttttgctttctggacgaatgttttcgttaattcgtcatcccgaagcgtgaaggtgacattcatgcgtgagcggctgtcttttctggcatgtcctttatagaagccgttgctttcatcaatacagctgtagagaacctgcgctttttgttcattgcgctgttcagcagtttccacaccgccgttttccttgagccactccagaacaaggctcagcatataaatcgcaaatgtcggcggagtgttgtagagtgaatccgctttgacatgcgtggaatatttcaggatttttgggacgttcgcattttcatttttcagccagttttttttcatgatgactacagtcacgccggaagggccgaggttcttttgggcgcctccgtagatcacgtcaaatttagacacatcgatttttctgcttaaaatatcgctggacatgtcggctacgagcggaattggagaattcggaaactcctgccactgagtgccgaaaattgtattgttggatgtgatatgtaaatatgcgccgtcttttacatccgtaaggtcaacctctggaatatagctgtaattgtctgtttcacttgtagcggtgatagacgtgttcccgaacaatttcgtttctgccagtgctttttcagaccaagcgcctgtcatgacaaaatgtgcggttttttcaggtgttaaaaagttcatcggaagcattgagaattgaaggcttgccccgccttgaagaaacaagatatcgtaatcttccggaatgcccatcagttcgattaagaggcttttcgctttttggtgcaccgcttcatactctttgctgcggtgggaaagctccataatagacatgccggattcgttaaaatcaataaattctttctgtgctttttgcagaacttccagtggcagcgctgcaggacctgcgttaaaattcgttgtacgttccattatgatctctccctgttttccacgttaatgtataaaataatacaattatcctatcacaaaaattcagttttttgataaaaaattagaattatcaaaagaaattgacggatgtttgcgaaatgttcacaaaataaaataacctcatcttatgatgaggccaggcgttttgcgatagaggaagagatgttctgcagatcctccggtttataatcatcagcatgcgttttccaaaccgctccgaatccatctccttttccgtagcgagggataatatgcatatggtagtggaacacagattgtccagctttttcgccgttattgttcagcgtatttaagccgatcggttcaaattcatcccggatagcgcgggcgattttcggaacagcatggaaatattgttttgctaattcatctgtaaattcatatacattctcaatatgtgttttcggaatgacaagcgtatggccttttgtcacttggctgatatcaagaaaggcaagtacatgttcatcttcatacaccttcgcggatggaatgtcgccggcgataattttacaaaagatacaattttctgcacaatgcatgagggttcctccttatgaaattgtttagtatgtatacactcatcgtaccacagaaatgcagaaaatagaaaacaggatgaacggcgagcgttcaccctgaatgcagaggaagagcttatatgaagaaaatgtgttatgcctttggtaagcacctcatttgtcaataaaatgaagacttgtttaatgcctaacgattcctgcgataaacacctcatttgacaatttgcttcatacatgaagaattcatcaattcagtgaagagaaatggtttgagcattggacatgtttattttctatccaactgtttctaagacgtctttgacaaacacctcatttttcagttgatatgcttttcctctacaactattatgatgtccagaaccctgtctctttatgacagcaaattcatcatttgttaaaagggaattgtttcaaatcaggccttgtttttggtactatgaagaaaaacactataaggggagaaactatgtctctgctatcggtaaaagacttgaccggcggatatacaaggaatccggttttaaaaaacgtatcattcacccttgaaccgaatcaaattgtcggattaatcgggctgaatggtgctggtaaaagtacaacaatcagacacatcatcgggctgatggacccgcataaaggttcaatcgaattaaacggtaaaacgtttgctgaggatccggaaggctaccgttcacaatttacctatatacctgaaacacctgttttatacgaagaattgacgctgatggagcatcttgaactaacagccatggcatatggactgtcaaaagaaacgatggagaaaaggctgcctccgctactaaaggaattccgaatggaaaagaggctgaagtggttcccggcccatttttctaaaggaatgaagcagaaggttatgattatgtgcgcatttttggcagagcctgcgctctacattattgatgagccttttctagggcttgatccgcttgccattaacgcgctgcttgaacggatgaatgaagcgaaaaaaggcggggcgagcgtgctgatgtcaacacacattttggcaacggcagaacgctattgcgattcgtttattattttacataacggcgaggtgcgggctcgcggcacgctgtcagagctcagagagcagtttggaatgaaggacgcggcgctggacgatttgtatcttgagcttacaaaggaagacgctggccatgaataatatgcttgatatttggcagtcgcggctgcaggagcatatcaaagaaacaagaacatacatgaaatatatgctcaatgatcacctcgtcattgttttgattttttttctagcgggcgctgcaagctggtacagcaaatggatacgggacattcccgctcactttccatccttttgggtgatggccgtgctgttttcgctcgtgttgacaagctcttatgtgcgaacgcttttgaaggaggctgaccttgttttcttattgcctcttgaagcaaaaatggagccttacttgaagcaggcgtttgtctacagctatgtgtctcagctgtttccgcttattgcgctgagcatcgttgcgatgccgctttatttcgcagtcacaccgggggcttcgctcgtatcgtatgccgcggtctttgtccaactgttgctgctgaaagcgtggaatcaggtaatggaatggcgaacgactttccaaaacgaccgcagcatgaaacggatggacgtcatcattcgctttgcggcgaatacactcgttctttattttgttttccaatctgtttatatgtatgcgcttctcgtctatgtcattatggctgtcctttatctgtatatgtcttccgcagcaaaacggaaaacatttaaatgggaaagccatattgagtccgaattgagacgaaagcagcgtttctatcggattgccaacctgtttactgatgtgccgcatttgcgaaagcaagccaaacgcagagcttatctcgactttttgctgcggcttgtgccgtttgaacagcgcaaaacatttgcctatatgttcacccgcgcctttttgcgttcgagtgattatttgggcattcttgtcagattaacgatcgttttcgcgctgatcattatgtatgtctcagctagcccgttgattacagcggttttgactgtgtttgccattttcattacgggcattcagcttctgccgctcttcggccactttgaccatctggcgcttcaagagctgtaccctgtgaaaaaagaaacaaagctgaaaagctatttctctctattaaaaactgcacttagtattcaagcgctgctgatgtctgttgcatctgcctatgcagccggcttgaccggttttctgtacgcgctgatcggttctgccgttctgatttttgttgttttgcctgcttatatgacaaccaggctgaaaaagcacggaaagctgtgaactgaaaagaggtaatcaaatgacagataatcagctgctgatgcaggaagctttggaatggaaaatgcattttttgcgaaaggattccatgtttgaacgcttttcgaagcgtgtgcagacgaaggtgaatgaacggattcctgaaaaaatccatacggtcgtcaccgagagtgtgaaaaaaatggtagaagcgacaatgaccggctccaatatcatcacttataaaaaggatacaagtgcactgtcgctcagtgaaaaaaatgaattggcgaaaaaaacgattgtttcttatcagaaagtgggagctgctgagggagtcggcaccggagcgggcggcatttttttaggcattgctgattttccgctgctgctttcaattaagatgaagtgtttatttaccttgtcttccatttacggctttgatgtgaaagatgcacaagaaagaatgttcttgctgctcgtgtttcagcttgcgttttcgagtgatgatggccgtaaatcgcttttttctgtcatcgaaaattgggagacggagaaaaagagcatcgactggagagtgttccagcaggaatatcgcgattatatcgacgtcgtgaagctttttcagcttttgccgggcgtaggagcggcagtcggcggaattgccaattataagctgcttgctcagcttggagaaacggcaagacatgtttttcatctgaggatattaaaggaaacagccggagaataaacactccggctgtttttttatagctgatgataggtgatcgcagcgccggcaaggaccttggccgctgtcagcatggctttttcgttgatatcaaatttcggatggtggtgggaataaactcggtctggctgttcgggagcggcacctgtaaagaaaaaagtgcctttcacgttttgtaagtaataagcaaaatcctcgccgcccatttgcggttcaccttcaatgacctgctgaacgccctcggtattctttgcggtgctcaccaagtggctcgtttcggcaggatggttcacaaccgccggataaccctgttcataggtgtactcataggacgcgccgtgcatgctgcatattccttttacaaccgctttaatttctttctccagaatgtcccggacattttcatcaaaagaacgtgctgtgccgatgagtactgcttggtctgcgatgacattaaacggattgtctgcgatgaaggaacctgtcgaaatgacggcggattgaatcggattgactttgcggctgacaatgtgctgcaaagaggtaacgatttgagaaccgattaggacggcgtctttagtatcatgcggatgagcgccgtggccgccctttccgaagactttaatcgtaaatcggtctgccgccgccattacggcaccggggcggcaaagaatggttccgagcggctcagttgcccaaagatgagtgccgaatatcacatccgcgttttcgagacagccgtcatcaatcattggctttgcgcctcccggataatattcttctgcatgctggtggatcatcacaaatgttcccttcagttcatgtctgttttggtgaaggaccttggccactgcgagaagagctgcggtgtggccgtcgtggccgcatgcatgcatgacaccaggcactttggaggcgtaagggacatctttttcatcttgaatggggagagcgtcaaagtcggccctcaaagcgactgtagggccgggttcgcttccttctatatatgctaaaacccctctgccgccaacgtttgtgcggattgggactcctaacgattcataataggaagcaataaatgcggcggttttttcttcttgaaatgagagctcaggatacatatgaaaatggcgcctgatctcaaccatttcttcaaaacagccgtcgagctgtttgtttatctctttctgcagtgtggatatggacaaagccgcttcccccttttctatgttttccatgattgtatataaaaagtctgaatatttcaactcatgctgttttaaagcatcatcacagctgcgagggttgtcaccaaaaggccaatcgcgacgggaatgaagttttttctggcaagctcaaaaggatcaactttgcaaatggccgcggcgggaatcagcgcccatgggactagtgttcctccgcccacccagatggcagagatttgtccgagcgcggtcagaacggcgggatcggcatggagagcggacgaaaagagctttgcgatggagccggcgagagaaatgccagaaaatcctgagccgtcaaggcctgttatggctccagcggcagttaatgcagcggcggcaagctcctttgacataggcatcatatgggataaagcaatgccgagatcgttgacaatgccgtgggaacctttagggagtgaagtgcccagtatgctctcatagcctgagtcgccaagataaaagaaagcggcaatcgggatgacggggccgaaaaccttaaaaccgaatttaaatccgtcaataaaatagccggtgattttttcaagccctttatgcttatacacgaaaaaatgaacggtaaggaggatacagattgcagacccgccaattaacgcggtggcatcatttccttgtaggttaaacaagagcatacaggcgatatctgcaagaaaggcaagcggaatcaaaaaagccagtatggaccgcaggcgttttggtaagtacagcgagttgtcttgttcgccggaaagaacgggggaaaaagaagcgggatgctcctgttttttgcgttcgcgctgaatcatgataaaggcagctgttgttgttgtcacacccataatcagcacaagcggaatgctggccgagacgacatcaccgactggaatgcctgctgcatccgcagtcagctttggcgccgcctgaatgacaaagtctcctgacagggcaaaaccgtgtccgaataagttcatggccatggccgcggcaagaggcgtcaaaccggcacgtgcggctgcggggagcaggacggcgccgatcaaagcgacacccggagaaggccagaagaagagagaaatggcgaacatcaggcctccaatcagccaataggcagtcacaggccctctcacaaggcttgcaaagggagaaatcatcgcttcatttatccctgtttttgttaacaaatcactcattgaaacgataaagcaaatgatgaaaatcgtgggcagcagttcgccggccgcatagataaagctgtggaataaactgctgacagaagctgaaagtgaatggctggcccatagcgatatgataaaaatgccgaatagagaaataaatgtcgtgtcttttctcagcagcataaataggataattactccgataaaaaacacatacagaacatggacagacaaaatcccgacttccatcatcgatcactccttccgcttacagattattcataggcgggcggaaggtgccgggacagaggggagggttatgatggaagatgaacattgatctgtttcagctgctcatcagatgatgccttaatactctattcgctttttgcagatgttttgggaagcattcaggagaaaaaatgacgcacccttcagcaaaccagttttttctataggcgatgatgctttccgatggctctaaatatgaatcatcctcgtgctgcatctcgtaatcatcaaatccgaactgaaaaccgcagcacgggcagatttcatgagaatgattgccttcatgatcatatggcggttcagtcaatcccttaaacccgcagactgggcaagtatgcttcattttgctttcctcccaataaaataagctgccggacatgccggcagctattcgacagcgaaatatgtggtgacataggaaggccgggagaagatcgacgttgtgtcaattccggcagatgtatcgcgttttttgtgggcttctttgtaagaaccggactgctgccagtcttgaaaggcgctttccgtttcccacaaggtcagaatgacataggtgtcactgtcaagcggacggagcactcgaattgcttcaaagccaggctcgttttcgacttttcccgctctgtttttaaatctgttttcaaacagcggacgtccttcctgagtgacggcaatattgttcaatactgcaaaaccgggatgtttgatctctccgacttggtcaatgacttcataagcgtgtggtgcctggaaaacggtatctccgtttgtttcatgaatcaaaatggcgttttcctgcccctgcatcaaaaggatattttctgagggatgcttttctacgatcgtttttaaaaaatcggctgtcccatatgtaatataaaccttcatatcagccacctcctgcttgctagtatatcaaaacaatggtataagtttctattggcgagtgcttcgaacataattccaaacaatttttcccatactacctttagaaaggcgaggtgagttcatgtttaagataaagaaaaagaaactttttatacctatcattattttagtgttaactgcttttctcgctttaataggatatatttcaattatttttctcggccattatgtcatagatgaaaagaagctgatacttcatgcttcttcaaaaattgttgatcaaaacggagatgaggttgcaagcctgtatacagaaaatcgtgagccggtctctatcaatgagattccaaagcaggtcagagaagcgtttatcgctgttgaggataaaaggttctatgagcatcacggcattgatgcaaaatctgtcggaagggcagtgtatcgcgatatattagcaggcggaaaggtggaaggcggaagcacgatcacccagcagcttgccaaaaatatttttctgacacatgacaaaacgtttctaagaaaaacaaaagaagtgatcattgcgattaatcttgaacgggattacagcaaggacaagctgcttgaaatgtatttaaatcagctttacttcggacatggggtttacggcatacaagcggcgtcccactattattttaataaagaagtaaaagatttgactgtatctgaaggcgctgttttggccgctattccgaaggcgccttctacgtactctccaattttgcaccctgataaaaataaggagcggcgtgatacaattctaggtatgatgaatgaccaaggctatatcagtgcgaaagaggctgtcaccgcacagggccgaacgcttggactgcacgtgaagaaacagtcggaaaccccttggtttgacagctacattgaccttgtgatcaaagaggcggaagacaagtattccatttccggagagcagcttcttcaaggcggatacacgatcaaggtgccgctcgattcgaagctgcagaagacggcttaccaggtgatgaaagagggaagctattatcccggaacagatcagaatgccgagggaagcgcggtatttattaataacaagacaggcggtgtagaagcggccatcggcggaagggattacacatccaaaggatataaccgtgtcacagctgtccgccagccgggttccacatttaagccgcttgctgtatacggaccggcgatgcaggaaaagaaatttaagccatattctctattgaaggatgagttgcagtcctacggagattatacgccgaaaaactacgacagcatgtatgagggcgaagtcactatgtctgacgccattacgtacagcaaaaacgcgccggctgtctggacgctgaatgagatcggcgtcgaaacaggaaaatcttatttgaaagcaaacggcattgatatccctgatgaaggccttgctctcgctctaggaggcttggaaaaaggcgtttcgccgctccagcttgccggcgcgtttcatacatttgccgcgaatggaacgtatactgaacccttctttatctcgagcataatagatgaagacggagaaacaatagccgattataaagaagaaggaaagcgggttttcaacaagcagacgtcttggaatatgacgagaatgctgcagcaggtagtcaaaaagggaacggccacgtccggcacctatcacggcgacctggcgggaaaaacaggctctacatcttatacaggcgtctccggcgcgacaaaggacgcctggtttgcaggctatacgccgaaaataaccggggcagtctggatgggctatgacaaaacggatcaaaaccattatttgaaagccgggagctcatacccgacgcggctgtttaaggatattttgacacaggcaggagaaaccggtcatgtgttcacaaagcctaaaaacgttaaagacctggaaagcccgattgagctgaagccggtcaaaacactcacagccgattacacatttaaagcagcggggctctttactattgaattaaagtgggacgctcaagaggatgatcgggccgtatacagaatttatgtaaacaaggacggcgaggagacgcttcttgattcggttgaagggaagggaagctatgaaattccttatgccaacttattttcgggcgcgtcttataaaattgtgccttataatacacagacaaaaagagaaggggaaggaaccgattacgttcagccgaaattgttttcctcttaatggaattcggcgattttttgaactttgagctacatttctataccatttgcctaaaacaaggtatagtgtaataagtcaagaaatacgaacgtatggttgccgtatgaaaggtggaaatcagatgagtaaacgagaaacgtttaacgagacgtttttaaaagctgcgcggggagaaaaagcggatcacacgcctgtgtggtatatgagacaagcagggcgctcacagccggaatatcgcaagctgaaggaaaagtacggattgtttgagatcacacatcagcccgaactttgtgcgtatgtcacaagactgccggttgagcaatacggagtcgatgctgcaatcctttataaagatatcatgacgccgctgccgtcaatcggtgtggatgttgaaatcaaaaacgggatcggtcctgtgattgatcagccaatccggtctctggcggacattgaaaaactcggccagattgatccggaacaggacgtgccgtacgtgcttgagacgattaaactgcttgtcaatgagcagctgaacgtcccgctcatcggtttctcaggtgcgccttttacgcttgcaagctatatgatcgaaggcggcccgtcgaaaaactacaataaaacaaaagccttcatgtacagcatgccagatgcatggaatctgctgatgtccaagcttgccgacatgatcatcgtgtacgtgaaagcgcagattaaggcaggcgcaaaagcgattcaaatctttgattcgtgggtcggcgcattgaatcaggcagattacagaacatacatcaaacttgtgatgaaccggatcttttcagagctcgcaaaggagaatgtgccgctgatcatgtttggcgttggcgcaagccatcttgcaggtgattggcatgaccttcctctcgatgttgtcgggcttgactggagactcggcattgatgaagccagatcaaaaggaattactaaaacagtgcagggcaacctggacccgtccattttgcttgcgccatgggaagtcattgagcagaaaacgaaggaaatacttgatcagggtatggagtcagacggcttcattttcaatcttggccatggggtatttcctgatgtcagtcccgaggttttgaaaaaactgacagcatttgtccatgaatattcacaaaacaaaaaaatgggtcaatattcctaagcatatcttttggtatcttaatgatatcctgtcaaaatgtttgtatcagatcattaaagagggtgtaaacagtgagtagaaagaaaatggggcttctcgtgatggcgtacggcacgccttataaggaagaagatattgaacgttattatacacatatcagaagaggcagaaagcctgaacctgaaatgcttcaagatttgaaagacagatacgaagcgattggcggcatttcaccgcttgcccaaatcacagaacagcaggcgcataatctggaacagcacttgaatgaaattcaggatgagattatgtttaaagcgtatatcggactgaagcatatcgagccgtttattgaagacgccgtagcagagatgcataaggatggcattacagaagcagtcagcatcgtgctggcgccgcatttctccacgttcagcgttcagtcctacaacaaacgcgccaaagaagaggctgaaaaactcggcggcttaacgattacgtcagttgaaagctggtacgatgaaccgaagttcgtgaaatattgggttgaccgagtgaaggaaacatatgcgtcaatgcctgaggatgaaagagaaaacgcaatgctcatcgtatccgcacacagcctgccggaaaaaatcaaagaatttggagacccgtacccggaccagcttcatgaatcggcgaaattaattgctgaaggcgcaggcgtttccgaatatgctgtcggctggcaaagtgaagggaacacgcctgatccttggctcggacccgatgttcaggatttaacacgtgatttattcgaacaaaaaggctatcaagcatttgtatatgttcctgttgggtttgtcgcggatcacttagaagtgctttatgataatgattatgaatgcaaagtggttactgacgatatcggcgcaagctattaccggccggaaatgccaaatgccaagcctgaatttattgatgctttggcaacagtcgtattaaaaaaattaggacgttaaagaaggcgatgaacatgagtgacggcaaaaaacatgtagtcatcatcggcggcggcattaccggtttagccgccgccttctatatggaaaaagaaatcaaagaaaagaatctgccgcttgagctgacacttgttgaggcaagtccgagagtcggcgggaaaatccagactgtcaagaaagacggctatatcatcgaaagagggccagactcatttctggaacgaaagaaaagcgccccgcagcttgttaaagacttaggtcttgagcatttgcttgtcaacaatgcgaccggacaatcctatgtgcttgtaaaccgcaccctgcatccaatgccgaagggcgctgtaatggggataccgacaaaaattgcgccgtttgtttctacgggtctgttttctttgtctgggaaggccagagctgcaatggatttcatcctgcctgcgagcaaaacaaaggatgatcagtcattgggagaattcttccgcagacgtgtcggagatgaagtggtcgagaacttaatcgagccgcttctatcagggatctacgcaggcgacattgacaagctcagcctgatgtcgacatttccgcaattttaccagacggaacaaaagcatagaagcctgattctcggcatgaaaaaaacaaggcctcaaggctcaggccagcagctgacggcaaaaaaacaagggcagttccagactctgtcaaccggtttgcagacccttgtagaagagatcgaaaagcagttaaagctgacgaaggtgtataaaggcacaaaagtgaccaaactcagccatagcggctctggctattcgctcgaactggataacggcgtcacacttgatgctgattcagtaattgtgactgctccgcataaagcggctgcgggaatgctttctgagcttcctgccatttctcatttgaaaaatatgcactccacatccgtggcaaacgtcgctttaggtttccctgaaggctccgtccaaatggagcatgagggcacgggttttgtcatttcaagaaacagtgactttgcgatcacagcctgtacgtggacgaataaaaaatggccgcacgcagcgccggaaggcaaaacgctgcttcgggcatatgtcggaaaagctggagacgaatccattgtcgatctatcagataatgacattatcaacattgtgttagaagacttaaagaaagtcatgaacataaacggcgagccggaaatgacatgtgtcacccgatggcatgaaagcatgccgcagtaccatgtcggccataagcagcgtatcaaggagctgcgtgaagcacttgcatctgcgtatccgggtgtttatatgacaggcgcttctttcgaaggtgtcggcattcccgactgcattgatcaaggaaaagctgccgtgtctgacgcgcttacctatttattcagctaaaacctccgctttatcgcggaggtttttttgatgtgcaatggcaatattgtgtaaaaaaatgattgaattgaacggcaggttatgatacatttgcatatgtacttaatgactaaaatgttcaaacggtcagtttcgaggtgaatacaatgtcaatagatcgaaaaaagctcattttggaggcggctacaaagtctttcacgcagttcgggtataaagcgacgacaatggatcttgtcgcaaaacttgcgaacgtggggaagggaaccatttatacttttttcaaaaacaaagaagagctgtttgacgagattttcactactttattaaaggaaatgaaacaaaaagcggatgaagcgatggagccgaaccttccgttccatgaaaatgtgcacagagcgctgtttgccattctggagttcaggaaaacacatcagctgacgattaaaattttccaagagaatgccgagattggtacaatggctgttcaggaagtgatccagaaaatggagcgagccatactgtcttatatcaaaagtaagattgaagacgggatcaaaagcggcgcaatcaagccgtgcgaccctgaactgacagcctttgtgatgctgaagctttatatcgcgctcatttttgactgggaaaaacaacaccccccgcttgataaagagacaattgcgggactgcttgaattgtatgttgtcaaaggattgtcagcgaactagataatcctttctctttgcaagaaaatgaccatttttcatgatgagtcagttttagaatggaggcatcaggatgaacacaatacgaagtcagtggaaagacatcgtaacaagtaaaaaattattgattcccatcatcgccattttgtttgtcccgcttatttacagcggcgtattcttaaaggcttattgggacccgtacggcacagttgaccagctgcctgtcgttgtcgtcaaccaagacaagggagcaacgtatgaaggagaaaaacttcaaatcggtgatgatctggtcaaagaattaaaggataataacaactttgattggcatttttccaatgatctcgaccaatcgttaaaggacttattgaatcaaaaatattatttagttgtcgagattcctgaggatttttctaagaatgccagcactgtattagacaaaaatccgaaaaaattggatctgaaataccatacaaatgcaggttctaactatgtaggggcaacgatcggcgaaaaagcgattgataaactgaaagcctctgtttcaaaagaagtgaccgagcaatatacgaaagttatttttgataactttaaagatatcgcaaaaggtttgagcgacgcgagcagcggcgcgaaaaaaattgatgacggcacaaaggatgcgaaaaacggaagcgcccagctgaaagaaaatctggcgaagctgaaggaaagcaccgctaccatcagtgacaaaacagcgcagcttgcagatggagcggctcaggtgacgagcggcatccaatcgcttgacagctcgctcggtaaattccaggacagcagcaaccagatttatgataaatctggccagcttgcagcaggatcaggcaagataacgggcaagctgaatgaactgaatgccggccttcaaaaggtgcagcagggcttgcctaatctgacaaacgggctggatcagctaaacagtaaagcgcaagaaggttctgagaaagcatcaaaagcggaaaaacttataaatgcgctcgatttaacgaagcttgaaacagctgtgaataacctcgaaaagtcagaaacagcgatgaatgaatttaaaaaacagctgtctgactttgaaaacagcttaaaaaaccgtgatcaggcatttaaaaatatcatcaactccagtgatttcttaacagcggagcaaaagagccagctgatcagctctgttgaaaagcagcttccgaaagttgatgcgcctgattttgatgaaattttaagtgggcttccttcagctgatcagctgcctgacatcgcaacgataaaaagctcattggaagatgtgaaagcgcaggttgcccaggtgaaggcattgccggaagctacctctaaactttataacggcgcaaaagccactcaagacgcgattgacaaattaactgctggatctgagaaattatacaatgcgtcacagcaggtgacagatggccaaactaaactgacagccggcatcggtgaatataataagcagttcgcaaaggcaaaagcgggctcagagcaattggtgacaggaagcagccaagtatccggcggattgtttaagctgttagacgggtctaaacaggtccaaagcggatcatcaaaacttgcagacggatctgcatcacttgatacaggtttaggcaagctgttggacggcacaggagagctgtctagtaagctgaaggatgcggctgaccaaacaggagatatcgatgctgatgatcaaacatacggcatgtttgcggatccggttaaaaccaaagatgatgccattcattccgttcctaactatggaacagggctgacaccttatatcctgtcaatgggcttatatgtcggcggcatcatgctgacggttgtcttcccgctgaaggaagcgtcagggcgtccgagaaatggttttgagtggttcttcagcaaattcaatgtcatgatgcttgtaggaatcattcaatcattgattgtggcgacggttcttctattgggaattggtctcgaggtagagagcacgtggagattttacgtgtttacgatcattacgagtctagcttttctagcgataattcaatttttggctacaacgatgggcaacccgggacgatttatcgcagtcattattttagtgctgcagctgggagcgagcggaggaaccttcccgttggaattgcttccgcatttctatcaggtcatccatggcgcattgccgatgacctacagcattaacggattcagagcagtcatttcaaacggtgactttggctacatgtggcagatggccggcgtcttaatcggcatcgccctcgtcatgattgcactaagcattacttactttacaatgttaagccggaaggaagaaacatcagaagaacagccggcttcataaagaaaaagaacttgtttccttggaaacaagttctttttttgttacattccccatttaataagcaatcctgtataggttaatccgccgccaaacccgaaaagcaaaacgatttgatcttttttcagcttcccggctttcactgcgagatcaagcgccaaaacaattgaaaccgaagatgtgtttccgtagtgctcaacactagtgagcgttttttcaatcgggaacggtgttttttcacaaattgactcgatcatgcgcaagttcgcgctgtgaggaacaaaccaatcgagatcatcagagctgagtcctgctttatgtaaaagccgttcaaattcgccagggacagttcttgcggcccatttatatacctcgcgtccgttttgcaccatttttccagaaccgacaagctgcacaccgtttatttcatttcgcagtccggcacgatacaaaatatcgccgccgttcccgcttgttccttgtacagacgcaagaaatcccggcgtttcttcatctcgttctactaacagcgcacccgcggcatcgccgaacagtacgcatgtcgttcgatcggtataatcggttacctttgataacgtctctccggcgatgacgagaattttttgatgaaggccagatgtgatcaatccatttgccaaatggaggccgtatgtcagcccggcgcatgtcgcattaatatccagcgcgccggtgctttcccagccgaaatattcctgtacgcggcatgccgtactcggaaaggcgtaatcggatgtggttgtggcaacgaggatcatatcgacatcatcaagcgttcctttataacggctcttgagattcttcaccgcttctatgcataaatcagaggtaaattgatgttcatccgcaatccggcgttctctcattcctgtgcgctgaacgatccattcatcagaggtatcaacgatcttttctaaatctgcattggttaaacgtctgctcggcgcataggtgccgatagctgtaatttttgcttttgacatatgaatcactccttatggtcagattataacactagatattagtatctggtactaaaaagaaggtttttttacaaaaaaagagaagtgtagataggaatctatgaaaaagaaaaaggaggctgaaaaatggtcagtcaagaagcagtagtctttttggcattatccggggctattgcgtttctgttgccaatcgggctgattgtatggtttaagcgaaagtatggtgcctcgcttaaagtgttttttattggcgctctcacgttttttgtcttcgctcagctgctggaaggcggcgttcatgtttatgtactgcaagtgaatgaaatgacgaaagaagcgatgcagcatccattatggtatggcatttacggctgcttgatggccggaatttttgaggagtgcggaaggtatatgatgatgcgattttttatgaagcgccatcatacttgggcggatggtctggctttcggggcaggccatggcgggcttgaagccatcctgattacaggcttgtcctctatctcacttattgtatacgcatttgcaatcaatagcgggacgtttgaacagcttttggtcaatggcgacgtcaaacaggcgcttttgccgatacaggagcagctgctgcatactccttcgtatgaatggatgctgggcggaatagaaagaatcagtgccattgccgtccaaattgggctgtctctgcttgttttgtacgcggttaaaagccgccggccgctgtttttgttgtattctattcttttacatgcactgtttaatgtaccggcggttttatatcagagaggaatcatagagcatgctgctgctgttgaaatcattgttgctcttatagcggctttatcagtttattggattgtaaaagcaaaaagggtgtttcaataaaaggtccaagcagcagcaatgcccgcttggaaaaatgtgaatggaaatattcattaagcgtgggtcatcagaatatttctgattcagtctttagcaatgacagcaagaatgtctgtgttttttacaagagaaacaatggtgtttctttttcttcttctcgcaagggtcatggcattctttctttttcttgcaatggtcgtggaaatctttatcgaaccactcgtcaaagaaccaaaaatcatcgaaccaatcgtgacaacgacatttctgttcatgtgaatgacgacagcacatagaaatccctcctcttcccatgctctctacagcatatgagagattgataggaaaagattggacgggtccctcgggaaaagagtatattttaagtagaaaataaaaggaggaatgccctatgacgtccgtacgtaaaacgatggagctcattaaagaacttgtatcgatcccaagcccgaccggaaatacatatgaggtgatcaattatattgaaagccttttaaaagaatggaaggtagaaacggttcggaaccacaagggcggcttaattgcaacgcttccaggacgcgacacatcccggcatcgcatgctgactgcgcacgttgacaccctcggcgctatggtgaaggaaattaaagcggacggccggctgaaaatcgatttaatcggcgggttccgctacaactcgattgagggagagtattgccaaattgaaaccgcctcaggaaaaacgtacacaggcacaatcttaatgcatcaaacgtctgtgcacgtatacaaagacgcgggaaaggctgagcggaatcaagagaatatggagatccgcctagatgaacctgttcactgccggaaagatacggaggagcttggcattggcgtcggagactttgtgtcgtttgatccacgtgtcgagatcacatcaagcggatttattaaatcgcgccatttggatgacaaagcaagcgtcgccttattgctccgcttaattcatgaaattcaaacagaagacattgagctgccgtatacaacccattttcttatttccaataatgaagaaatcggttacggcgggaattcgaatattcctcctgaaacagttgaatatttggcggttgatatgggcgctatcggtgacgggcaggcgacagatgaatattcagtatcaatctgtgtgaaggatgcgagcgggccgtatcattatcagctcagaaagcatttagttcaattagccgagaagcatcatattgactataagcttgatatatatccgtactacgggtctgatgcgtcagcagcgatcaaatccgggcatgatattgtgcatggcctcatagggccgggaattgacgcttcccatgcatttgaacgcacccataaatcatctcttcgccataccgctaagcttctgtattactatgtacagtcaccaatggtataagggggaggaccaatgaagatttataagctgaaaagcacattcggttgggaaggtgatgacgggttgggagaacagctgattcagcagatccttgccggagaaaaaaacgccacgtgcgcgccgaaatcattgtattcaaaagatgaattgagggacgtttatcaaacagcgggtcagcttgttaccgtttatgataaacatgacaatccaagatgcaatataaaagtaacagatgtctttgaaaccacctttggtgcgcctgatatgaggttagtcaaaggagagggcaatggagaccgaattgaggagtttcaagaggatcatcggatggcatgggcggaactgatcaaaagcggtgaactggagctgaatgaggatactgttttgattacagagttgtttgtgcttgttaaagattaaaaaagcctgcggggcaagaaccccgcaggcttttcattaaccagaaatggttgcgttttgttctgttttcgattgggacataacagtttctgctttcgcaggattaaacatgccttcccatttagacatcacaacggcagcaagcgcgttaccagtcaggttgacaactgtacgtgccatatccatgatgcggtctacgccggcaataaaggcaagtccttcagccggaacgccgatggtgccaagcgttgcaagcaagacaacaaaagaagtaccaggcacggcagccatccctttagatgtcaccattaagacgagcacaagcgtaatttggtgccaaatcgtcaaatcaatgccatatacctgtgctaaaaagagtgcggcaatagattgatagagaacggaaccgtctaagttaaacgtgtaaccgatcggaatgacaaatgaaacaatgccttttggacatccgattttctccattttttccatgatacgaggaagaaccgtttcagagctggacgtactgaacgccagtaagatttcgtccttcatgtaagcaaggaacttgaagatgctgatgccggcaatttttgcgacaatcccgaaaataacaattaagaagaaagcaagcgcgacataaaccaatccgacaagctttccgagagagataagagaaccgagtccgaatttagacacagtcactccgataagagcgaaaacgccgaatggcgccactttcatcacaaggtttacaacgtggaacatggcatgggatacaccttcaaaaaaggctaatacaggcttgcctctttcaccgatcgcggaaatacccaatgcaaatagtactgtaaagcagatgatggctagaagatccccttcgaccaatgactggaagaagtttgtcggcacaatatggaggaacgtttccgccactgatttattactttgttctttttcagtttcaacatattgactgatgtccgatttttgagcttcgtgtatattaactcctgtacccggatggaagatgtttgcaagggctagtccgagaataatggcaaaagtcgtgatgatctcgaagtacagaatcgttctgaagcctaatttaccgacttgctttccatttcctgcaccggctacaccgatgattaagctggagacaacaataggaatcactatcattttgattaagcgtaaaaagagatccccgattggctgcaggtaagtaggcaatgctgggttgccataccaaatgacgccaacaatgacacctagaataagtccaacgaatatttgtgtggctaatccaaacttaattcttttcatagattacctcccaaaaaacaaagtatcaacatatatcatgaatagacatatatttaatctcactattagatcaaattataatagataagaaatcaattcgtctatagtaaattatatttcgaaaataaagaatattcaatgacattatgataatcaccagaattatctaaaaacaggtgagctttgacctaacctgactattatttcaaaattaagagatatgtgaaaaaataagaaaatcccacgcgtaaggcgcgggattttcgctcattacaaatcgtttacttttatacagtcattgcagatattaccataacactcatgctgctcttctatcttttttccgcattccgcacactttttcgaaggcaggtttctaaaaaattctgtgattttccccagcataaccaatccctctttcccctttgtagtgatttcattgtaatataacagatcgcaaaaatcaataactgttttgatacaatgtttaaaacatgcttttttcaagaaaaatgggtatattgaaggaggatcaattttttttgaaaagataggaggacattatgaaagttacagttatcggatgctatggcggttttccggccgcaaatgaagcgacgtcaggctatttgtttcagtcaggtgattactctctgcttgttgattgcggcagtgccgttttgtctaagctgttcggatatgtgccggcggaaaagctggatgcggtcgttctgtctcattatcaccatgaccatatcgctgatatcgggccgctgcaatttgccaagcaagtcggttcgtttctcggcaaaggagagcatacgcttccgatttacggacatgatgctgatatagaacagtttcaaaagcttacatataaaacacatacaaaagggatcgcctatcagccggatcagccgttgactgccggtccgtttacgatcacctttttaaaaacgattcacccggtgacgtgctatgccatgcggattactgacggcagccacactgtcgtttatactgctgattccagctatcaggattcatttataccgttttcgaaagatgctgatttattgatctcagaatgcaatttttatgccgatcaagacggaacaagtgcaggccatatgaacagcctggaagccggacgcattgcaaaagaagccggagcgggagaactgctgctgacacatttgccgcattttggcgtgcatgacaatcttcgcaaagaagcgaaaaccgtttttaacggagaagtgaatattgcgaaatcaggttttgtgtgggaaggataaaggaggagcaccatgttatttatagacaatcaaaatatcaatgatccgcggatcaatcttgctatcgaggagtactgcgtaaagcatttagaccctgaacagcaatatttgctcttttatgtgaatcaaccgtctattatcattgggaaaaaccaaaatacaatagaagaaatcaatacaaaatatgtagaggaaaacgggattatcgtcgtccgccgtttatcaggcgggggcgctgtgtaccatgatctggggaacttgaacttcagctttattaccaaggatgacggggacagctttcataactttaaaaaattcactgagccggtgattcaggcgttacatcagcttggggttgaagctgaattaagcggccggaacgacattgtagtggatggccggaaaatatccggaaacgctcagtttgcaacgaaaggccgtattttcagccacggcaccctcatgtttgattcagccattgatcatgttgtatcagcattaaaggtgaaaaaggataaaattgaatcaaaaggcatcaaatcgatcagaagccgagtagcaaacatcagtgagtttctcgatgataaaatgaccaccgaagaattccgcagccatttgcttcgccatatttttaacacaaacgacattggaaacgtgccggagtataagctgacggaaaaagattgggagaccattcatcaaatttcgaaagagcgctatcagaattgggattggaactacggccgctcgccgaaatttaaccttaatcattcgaaacgttatccggttggatcgatcgatttgcgcctagaggtcaagacaggcaaaatcgaggactgcaaaatcttcggagatttcttcggtgtcggtgatgtatctgaaattgaaaacctgctggtcggaaaacaatacgaacgcagcgtcatcgctgatgtgctcgaaggtgtgaatctcaagcattactttgggaacattacgaaagaggatttccttgatctgatttattaaggcaaaacacatcgtttgaaagagcggttgtgtttttgaaataatggaggcaggagggattcacatgaaagtgtttttaatcggagcgaacggacaaatcgggcaaagactcgtctctttattccaagataatcctgatcattccatcagagcgatggtcagaaaagaagaacagaaagcgtctcttgaagctgccggtgcagaagctgtgcttgcgaatctggagggcagcccggaagaaatcgccgctgcggcaaaaggctgtgacgcgatcattttcacagccggttccggtggcagcacaggctatgataaaacactgctggtggatctcgatggagcggcgaaagccattgaagctgcggacattgccggaatcaaacggtttattatggtcagcgccctgcaagcccataaccgtgaaaattggaatgaggcactcaagccttattatgtggccaagcattatgctgataaaattctggaagcgagcggtttaacctatacgattatccgtccgggaggccttcgcaatgagcctggaacgggaactgtttcagcagcgaaggatctggagcggggatttatttcccgtgatgacgttgcaaaaacggtcattgcctctttagatgagaagaatacggaaaatcgggcctttgatctgacagaaggagatatgccgattgccgaagcattgaagaaactatgacagtactgacactcagggctttttgctcttgagtgtttttttctgtttctctataatggaggagaaagcttggcttcaataatgaatgactattcattcactttaaggggtgggagaatgaatcttgtttcaaaattggaagaaacagcatctgagaagcccgacagcatcgcatgcaggtttaaagatcacatgatgacgtatcaagagctgaatgaatatattcagcgatttgcggacggccttcaggaagccggtatggagaaaggggaccatctagctttgctgcttggcaattcgcctgattttatcatcgcgttttttggcgctttaaaagctgggatcgtggttgttcccatcaatccgttgtacacgccgacagaaattggttatatgctgacaaatggtgatgtaaaggcaatcgtgggcgttagccagcttttgccgctttatgagagcatgcatgaatcgctgccaaaggttgagctcgtcattttatgccagacgggggaggccgagccggaagcggcggatccagaggtcaggatgaaaatgacaacgtttgcaaaaatattgcggccgacatctgtcgctaaacaaaatcaagaacttgtccctgatgataccgcggttattttatatacgtcaggaacgactggaaaaccgaaaggcgcgatgctgactcatcagaatttgtacagcaatgccaacgatgttgcaggctatttgggaatggatgagagggacaatgtggtctgcgctcttcccatgtttcacgtgttttgtttaaccgtctgcatgaatgcaccgctgatgagcggcgcaactgtcttgattgagcctcaattcagtccggcatctgtttttaagcttgttaagcagcagcaggcgaccatttttgccggtgtgcctacaatgtataactacttgtttcagcatgaaaacggaaagaaagatgatttttcttccatccggctgtgcatttcgggaggcgcggccatgccagtcgcgttgctgacggcgtttgaagaaaaattcggtgttaccattttggaaggctacgggctctcggaagcatcacccgtcacgtgctttaacccatttgacaggggcagaaaaccgggctccatcgggacaagtatcttacatgtcgaaaacaaggtcgtagatccgctcggacgcgagctgcccgctcaccaggtcggcgaattgatcgtgaaaggccccaatgtgatgaagggctattataaaatgccgatggaaacagagcatgcattaaaagacgggtggctttatacgggggacttggcaagacgggatgaggacggctatttttacattgttgaccggaaaaaagacatgatcattgtaggaggatacaatgtgtatccgcgggaggtagaggaggtgctgtacagccatccggacgtcaaggaggcggttgtcatcggcgtgccggacccccaaagcggggaagcggtaaagggatatgtggtgccgaaacgctctggggtaacagaggaggacatcatgcagcactgtgaaaagcatctggcaaaatacaagcggcctgccgccattacgtttcttgacgatattccgaaaaatgcgacggggaaaatgctcagacgggcactgagagatattttgccccaataaaatgaaaaagcgaagcggttagcttcgctttttcattttcaatcctttgcttcttttttaataatatttagcagcgcctttgtatcatttttgcttaatttgtagtatgtgccatccttcaaaaaaacggcttgctggctgccgtcaatccatagtctgaatgagtcataccggtctttatgaaacttgattgtcccttcgtaatcaggggctgatgttttttctgtcttcacctgttttccctgattcataatatccagcatatctttgacgtgctgtcttttttcaatctcgatatcttcctggccgcttgaagacagtgtgatcaaatccgcgtctaccgattgatacacatcgcctgatcggctgtaaagataaaaaaatgcgataaacacaagaccgattaccacgatggctgccactatttttttcatttgcatcactccaaacattgttagttttcccagcgatcgggctttccatgcttaaaagggtggaaaagtgcggaacacagcttggttctaagaatttgaatttatgattacaatagaagtaacgggttgatgtgaggagtgaggcgttatgcgcaagtggattgcggcagcaggacttgcttacgtgctgtacgggctgtttttttattggtattttttcctgtcgggtgattccgcaataccggaagccgtgaaagggacgcaggctgatccggcttctttcatgaagccgtctgagttggcagtggccgagcagtattcgaatgtcaagaattttttattttttatcggggtaccacttgattggtttctgttttttgttctgcttgtcagcggtgtttcaaagaaaatcaagaaatggatcgaagcggccgtgccttttcggtttttgcagaccgttggttttgtgtttgtgctttcgctgattacaacattggtgacgctgcctttagattggataggctatcaagtatcgcttgactataacatttccacacagacaacggccagctgggctaaggatcaggttatcagcttttggatcagctttccaatctttacgctttgcgttctcgttttttattggctgatcaaaaggcatgaaaaaaaatggtggttatacgcctggctgttaacagtgccgttttcgctgtttctgttttttattcagccggtcattatcgatcctttatacaatgatttttatccgctgaaaaacaaagagcttgaaagcaaaattttagagctggcagatgaagccaatattccggctgaccatgtatatgaagtgaacatgtcagaaaaaacaaatgcgctgaatgcctatgttacaggaattggggccaataaacggattgtattgtgggatacgacgctgaacaaacttgacgattcagaaatcctgtttattatgggccatgaaatgggccattatgtcatgaagcacgtttacatcggtctggctggttatttgctcgtgtcgctcgccggattttatgtcattgataagctttacaagcggacggttcgcctaacccgcagcatgtttcatttagaaggacggcatgatcttgcggcacttccgctgttattgcttttgttttctgttttgagctttgcggtgacgcctttttctaatgctgtctcgcgttatcaggagaataaggctgaccagtatgggatcgagttgacagagaacagagaagccgctgttaaaacgtttcaggatttggccgtgacggggctgagccaggttgatcctccggtgcttgtgaagattttcagaggcagccatccttcgatcatggaacggattcaacatgcggagaaagaagagaatgcgccggaacatcaggatgctgacaaataaaaagaagcaggtatggaggaacctgcttctttttactattattgtgcagctgcttgtacgttgattaacccttttccatagtagaaagagtttccaagatatgttgcagtgctttctaaacgatcacggacttgcgcgtttgtccaagtcgggtgcttagaaagaattagcgctgctgctccggcaacgtgaggagtcgccatggacgtgccgttgtaagcaccgtaagtgcctccaggaagtgtgctttggatggatacgccaggagccatcacatcaagctcagaacctgcgcttgagaatgaagctctttggttgctgctgtttaccgcacctaccgcaatagtagaaggatattttgcagggtagccgactgtgcttgagcttccggacgaaccttcgtttccggcagcggcagcaacgacgataccgctggaaacggctttatcaacgactgttttcagcgctgtagaaccagaaggtccgccaaggctcatgttaataacatccatattgttggaaatggcccattcaatgccgttaataatccagctatattggccgcttcctgttgaatcaagcacttttactgcatataatgatgcgcttggcgctacgcccagaacaccgattgagttattaagagcggcaatcgtaccggctacatgcgtaccgtgagaactgccgtcctggtatgggtttgtttcagaaggtacgaagcttgctccgcctctgacgtttaagtcaggatgagaagagtcaattccgctgtcgataacagctacttttacgttagagcctgtgtagccttgagagtgaagagccggcgctttaatttgagaaatgccataaggaacagattgcgcatattcatgtgcaatatgatcttcttccacatatgcaacgctcggatcttttttcaattcttttacagctttttcatccaatgttgctgcggccgcgttaacatacttaaattgcttttgaacctttccgcctttttcagaaataacatcctttttcttggcggaactcatggcactcattgtctgtttaaatccgacaatgtatttcttttctgtactgctttttccggcagcctgcgcagacatgttgctgaacgccatcgtaaagattaacgttaacgcaaacaacaagctgatccacaattttttgcttctcactctttaccctctccttttaaaaaaaattcagagtagacttacttaaaagactattctgtgaatttattgtaatagatggaataatattttagtagacccatttttttgagatgattttatctctatttaggtatatcatctctcgctatttccgtagagactcgaaataactattttcatacagaaaagaacgaaaatagacatgagtaaatgttcattatgctgaaatgtcatgcttttttaggttaaatgctcctgagtcccggcaaatttctgtcgaaaaaattcgttcaaatgacctgcgtgtgcttccgtgagaacaatggatattatcgtgatattttttcaaagcatgatgataaaagtattctgaaaaataaactttacagaaaagggatagaatgaaaaaattattgagagggaggaagaaataagatgaacattcgccaagcaaagacatcagatacggccgccattgcgccgttgtttaaccaatatcgggaattttatagacaggcatccgatttgcaaggggcagaggcttttttgaaagctcgtttggaaaatcacgagtctgttattttgatagcagaagaaaatggagaattcataggctttacccagctctatccaacgttttcttctgtgtcaatgaaaaggatatacatattaaatgacttatttgtcgttcctcatgcacgtacaaagggagccggctgccggctgctttctgccgcaaaggattatgcagaggaaaacggggcaaaatgtttaacacttcagactgagcaccacaaccggaaggcaagaagcttgtatgagcaaaacggctatgaagaggataccggatttgtccattattgtctcaatgtgccggcgaagtgaaaatggcggcttgatgatttggttttttgaacgttcttcggttacgatataaatgaaaaggagtgtgccgaatgtcaacgttatttcaagccttgcaggcagaaaaaaatgccgatgatgtttcagtccatgtgaaaaccatatcaacagaggatttgccgaaggatggtgtcctgattaaagttgcttattccggcattaattacaaagatggtctggccggaaaagcaggaggcaatatcgtcagagagtatccgcttattttaggcattgatgctgcgggtacggtcgtctcttccaatgatccgcgttttgcggagggggatgaggtgatcgcgacaagctatgagctcggtgtctcccgtgatggcggattaagtgaatacgcttcggtgcctggtgactggctggtgcctttgccacagaatctttcgttaaaagaagcgatggtgtacggaacggcgggatttactgcggcgttatcagtgcatcggcttgaacagaacggtctgtctccggaaaaaggcagcgtgctagtcacaggagcaaccggcggtgtcggcggaattgcggtatcgatgctgaacaagcggggttatgatgtggtggcaagtaccggaaaccgggaggcggctgattatttgaaacagcttggtgcaagcgaagtaatcagcagggaagatgtctatgacggaacgcttaaggcgctgtccaagcagcaatggcagggagcggttgatccagtcggcggaaaacagcttgcctcgcttttaagcaaaattcaatacggcggatctgtcgcagtgagcggcttaaccggcggaggagaagttccggcaaccgtgtatccttttattcttcgcggagtaagcctgctcggaatcgattcagtatattgtccgatggacgtcagagccgctgtttgggagcgcatgtcttctgatctcaagcctgatcagctgctgaccatcgtggacagggaagtatcattggaagaaacgccgggtgcgttaaaagatattttgcaaaatcgcattcaaggaagagtgattgtgaagctttaacaggatcagcttgcagagaatgttatttttctgcaagcttttttgtggacaggatgatcagctgctgaactgctgtgtcgcgaaacaagattttcctgtaagccgaactttctcttctcattttaaaaataattggtgataatgattctcattccgtgttatactactcttggacatcttaaccatagaaactaccaacaggagagactggaacatatgaaaaaaacactgattattcttacagttttacttctttctgtcttaacggctgcttgctcgtcttcaagcggcaatcaaaacagtaaagaacataaagtggcggtaacacatgatttagggaagacaaatgtgcctgagcatccgaagcgggttgttgttcttgagctaggttttattgatacactgcttgatctcggcattacgcctgtcggggttgccgatgacaacaaagcgaagcagctgatcaacaaggatgtgctgaagaaaattgacggctacacatctgtcggcactcgctcacagccaagcatggaaaaaatcgcttcattaaaacccgatttaattattgctgacacgacccggcataagaaggtgtacgatcagctgaaaaaaatagcgccgacgattgcacttaataatttaaatgctgattatcaggatacaattgacgcttcgcttacgattgcaaaagcagtcggcaaggagaaggaaatggagaaaaagctgacggcgcatgaagaaaagcttagcgagacaaagcagaaaatcagcgcgaacagccagtccgtgcttttgatcggaaatacaaatgataccattatggccagggatgaaaacttctttacatcgagacttttaacacaggtcggctaccgatatgcaatcagtacgtcaggcaatagcgattcaagcaatggcggcgactctgtgaatatgaaaatgacactggagcagctgctgaaaacagatccggatgtgatcatcctgatgacaggaaaaacagatgacctcgacgccgacggtaaacgcccgatcgaaaagaatgtcctttggaaaaaactgaaggcagtgaaaaacgggcatgtataccacgtggatcgtgcggtgtggtctctgcgccgcagtgtagacggggcgaatgccattttggacgagcttcaaaaagagatgccggctgctaagaaataaaagaaaagacaggcaaacgcctgtctttttcttatttgataaagccggataagtggctgttgatattatagtcttttatccgccatttttcttctgcaaattcaatgttgctgaggcaggcgttgacgagacgggtgctttgaagctccgggtcaccgccggatatttctgtcagcagggcgtgaattgccgcaccgtgcgccacgatcagcaccttcttgtttggatacgcctgattcacttttgccaaaccgcccatcagcctgtcagtgagttcttctaaggtttccatattcggatagatgttatctggatagcgctttgtccgttcctccagcggcatgccctccgcgtcgccgtaatcgcgttccttaaaatcatccatctcgactatcggaagatgcagatattcattaataatttccgcggttcttttcgctcttttcagcgggctcgtcacaataatatcccaagaaaagtcctttacatattctccggtttctcttgcttggcgttcacctgttgcgtttagcgggatatcggttttgccttggcatttttgctgcaggttccaatcggtttctccatgtcttactaaacaaacggctgtcataaaatccccttcctgactttattcatatcgctattatactaaatcgaaagcgtgtgtcctatgaaaaagcctatgcaagaacttcaaataataaagcaagtccaattccgccgccgcttccgatggctgcaaccacatattgacagtctgtccgtcttttcgcttcataaaacaatctggttaccagagctgcacctgatgcaccgtacggatggccaagagctaaggcgccgccgcgcacattgatttttgaaaagggaatgccgagttcttgcgagcagacacaaattttgacggcaaaggcttcattgatttcaaataaaccgatatcctcaggtgttacatcgtgtgtatgtaagaggttacggatcgcatcaaccggtgccgcgggcggatagttggggtgaatcccactgactgcgctgccgataaaccggagcacaggcttaagtcccagggctgccgctttttcttcttccattaccaaaagagccgctgctccgtctgctatgccgctgctgttggctgctgtgactgttccggagctggtgtcgaaaaccggctttgcacggggaataatcgcttctattggccgcgttttcaaaaatgcttcgtccgtctccaattccccgagaggaacaatttcttcacggtaaaatcctccatcatgcgcgttcctgctgcgttgatggctgagaagggcgtactcatcctgcatgcttctgctgatggaatagcgtgcagccgtatattctgccgcaatgcccatgtctggatcgccgatggcatctggagaaaagcgggcccgttctgaaaaaggggattggctgctgctttctgagccgcccgcgatatacatcgtgccggctcccgcttgaataaggctgcaggcatagcgcacagcttcaaggccggagccgcactgtctgtcaattgtcattccgggaactgataaaggcagtccggcttgaagggctgacagtctggcgaggttgccgcctctgccggtagcgtttccgagaatgacctcgtcaacttgatcctctagctttcggctgagacagcggatgatgggagctgacaaatcctccggcaggaagggcttcagcagtccgttttgatttccaaagatcgttcgttttgcatcaacaataaccgcattcatttatactgtatactctcttccagccattttttcactctggaacgggcaatttttccgctgctcgtttccggcaagctgtctgcaaacacccattttttcggaattttataggaggctaatttctgtttacacaaggctttcagtgttctggcattagcgtttccatgaatgacagctacagcgatttctccccaatactcgtcgggaatgccaacgacagccgcgctttcaacctctgggcaggcgagaagcacacgttcaatttcttctgggaaaatatttaatcctccgtacacgatcatcccgttttctcttcctgatatgtatagaaagccctcttcatcaacatagcccatatcatccactgtcatccattcatctggtgtgctgccgttcacatagccggaaaaccgcatcgggctgttgacaaatatttttccgacttcgcctggctgacagcgttctccttcagcgttgcggatttcgatccggacattatgaaaagggcggcccgctgaatgcggtttccgtttgctgtcttccggtgaagaaaacgtcacaaaactaagctctgatgtgccgtaaaaatcgtacagcttgagatgaggccatgcagcggcaagcttctccttggattctgccggccagtctgcgccggatgaaatgattttgacgggactgtcgggaaaaccctcaatccttgtgagggcgtctgtcatcgtcggtacggtatagagaacactgatggattcacggcacagccattccttcgctttggcaggagaaaactttttcagcaaacaaacggttcctccgagaaacaaagtgctgactgccccgtataagaagtgagaggacattaacgtcccgggaatcaataccgtgtcatttgatgtaattgaaaaatctgtttctgtacaggtaaagctctctatccatgagcggtgagatcgcgtgaaggccttcggttttcctgtcgagcccgacgtaaatcccatataaaaagggtgctccggatcaatggtaggcaagggatcagcggttgcttcagaaatatctgccatacagttatccagcaaaacaacaggtgtctggctatctgtcagtttgtttttgaaaaaggctaaagtaaccacaagatccgcattgcttatggacagccgctccttacattcagccgggctccagcgtgtgtcgatgggaatggctgtgcaaccagccgctgcggctccggcaaacagctgtaaaaacgccagactatttgggagcaggatcgccacacgattcggcatgctcggctgtgaccgcagccaatttgcggtttgagagacaagccgatcccaatcctggtacgtgatttgctccgattcagtctggatcgctacacggccgggcgatgtttcggcagtagatgaataggtatgagtaattgtcatgtagtgtcatcctccttttgtaaacatcgtatcagaaagagacaaggcttgagtgatttttatcgccagaaatgcagatacagccgcttttatcaaatcaccaggcacatatgcaaggctcatgaaggcggcctgtgacaaatcaatatgcatgataaaagcttgtaccggtataccaagcagataaataaagatgatgccgaatacgatatgagtgaaaaagagacgcaatactgtcaccttccgcagcctgttagcggctaaactgatcagccatgaagcgaggggataagcaatcaaaaagcctgcgctcggtccgaaaaacacaccaaaaccgcctcgtccgccgggcaacagcggcgctccgaaggcgacgagcagcaaaaagacaagctggcttaagatagcagactttggcctgagaatgctgcctgccaacatgacaccaagcgtttgcaatgtaatcggaacgggtgtaaaggataagaagagagggggcataaagccgagcactgccatcagcgcggtgaaaatcgcaatatgcatcatgtcgattaatttcagcatgtgaaatcctccaaacagtaatcaaatatggttatacaataaatgccggtaattattatgtcaactgatttttgatttaagtttacataatgaacgcaaaaaaaccggccgtatggcagaccggtttttgatggttattcttctgtcaggatgacaagcgaatcaacggaagcggccacatgggaaacggcgcggctgacttcctgaagccctccaagaaaggcttgcagatcgacgtcgattttgcctgattgctctttgctgattttcatgctgtggacgatttcatcgaataagcggttaatttgcgtcattttttctttactttcgctgactagctcattcacgtctttgatatgcttggatacaatgttgatttgtgtattcgtattgttcacaagctcagaaacagtagagacggtttttttcgtgtcctcagaaagcttccgcacttcatttgccacgacagcaaagcctttgccgtgttctccggcgcgggcggattcaatagatgcattgagcgagagaaggtttgtttgttcagctatgcctgtgacgatgccgaagattttttcaatttgctgcgcgatttcatccagcttgaccatttctttttcgatttggacaaggcttgtgtcaattttgttcatctgtttttgctggacttctagctctttttttccgccgatcgacttttcttcaacagtgctggatgttacagtgccggctttggatgcttgagaaatgccttcagatttgtccacaagctcttgaactgatctgcttgtttctgaaaacagattggcaatcgatccagaggtttcttgaattttctgatgaagaaggtttttcttttcttcttgttcatcacgggtctggttgtactcgctttgaaacgcttcaaggacaagctgctgttctaagttcaagatttttgttgttgctttaatggcttttagcagttcttgctgatttgtaatggacgcttcataaatgtcaatcattgacaaaagaagctcttgaaacgcacccatataccattttggcaaaaggccgattcttaaatggatggaggcgattcggttacgcttttcaataaattcatcatcgataacgcctgcaaacatttcctgaatatgccgttttaacgtttgttttaagcggtcaactgagctgtgatcattaatgatatccatcaatgagctttcatggtcaaggtttttataaaacgcatcaacgatatttacgatattttcttgaatgagtggctgaagctgctctaacacgtaaagctcagcatctcccaacctgaccattttgagctgttttttgacatctgcatgtttgtttgtgagctgaatgcggtttttttgctgtccgtttgaatctgaaaagtaagctgtttcttgttttctgtcttttttaaataacaatacaatgatcccccttgggaaaaatataatttttactttttggctttttaagcctttttcttttttatcggccaagggaaacatgaatgaagctgcagatgaaaaatatttgaaaaaacgttcattaaaatgaacggtttaatcgagatctatttgttttaatggtttaatggccggaccctctacaacttcgccagatggcttaaagcgtgatccgtggcacggacaatcccacgtatgctcactgtcgttccactcgacctcgcagcctaaatgggtacaagtcgtatcaacgagatggaggcagcctgtctcatcacgaaatgctcccgctcgcctgccgtttatggtgacggctttcccttctcctggcgaaatgtcttcaaattggacatcaggcttttcaagctttccttttatcaaatgcttggcgacatctgcattgtaggaaatcactttctgcaacccgggattcagatggaaacgggacggcgtgaaaatgctttcgtatgggttttcttttttctccacaaggtctgacaataaagtggctgcgactgctgaggacgtcatgccccattttttgaacccggtcgctactagaatattgtcctcattttccgacatcggcccgataaacgggattttgtcgatcgtcactagatcttgggtggaccaataatatggaatgctttcgatgccgatggtgctttcggccagttgtctcagtgtttcataatgtgtagacatggcttttccctggcctgttttatggcttactccgctgaagagaatcagcttttcaccgtttacaaccgtatagcggagcgccactgacggctgatcgatactcaaatacatgccctcgggatactcgatcttcggcttgatggcaaggacataagatctgtcggagtacattctcgcagcatataatccgcctccgtcataaaaagggaagtgggaacagcatatgataaagcggctcttaatggcgtgccggctttttgttaccacttcgggcctttcgccttttttgatatcaagcgcaacggtctcttcataaattcggccgcctttttgaacaatttgctccagaagcgcttttaagtattgaagcggatgaaattgagcttgattcttcatgacaagcgccagcttagaacctaagggaattggaagatccttgataaggtctctttcaattccgagctttgtgtatgcctcatgctcggtgtggattttttgaacagcgttttcatttgccgtataaagatatgcgtcttgctcggtccattcacaatcaatttgatgttcatccacaatgccttttatgtaatcaattgcgttttggtttgcttcataataaagcctcgcatggtttaatccgaaatggcggataaattcgtcgtatatcatgtcatgctgtgcggtaactttagcagttgtatgcgcagtggttccgttaagaacctgatttgcttcaatcaaaacgacacggaagcctctcttcgtaagttcatatgccgttgtgattcccgtaatcccgcctccgataatggtgacgtcacattcagtgtcctcttgaagcgcaggaaaagaaggcaggtcagttgatgttttccagtatgtttcaggtgcttcctttgcaaaatgttgattagccaagccgttatacctccaatcagatttattcttaatttttccatattctatcttttcatacataggaagcaggcattgttcataacataataaggttgaaaaggagtgatttcattggcgaatcaaaaaaagaaaacattaccgcctcagcaccagaaccagcagcctggttttgaatatctgatggacccgcgtccggtttttgataagccgaagaaagcgaaaaaattagagggcaaaaccgctattattactggaggagacagcgggattggacgcgctgtctcggtgttattcgcaaaagaaggggctaatgtggtcattgtgtatttgaatgaacatcaggacgccgaggaaacaaagcagtatgtagaaaaggaaggggtaaaatgcctgctgattgcaggagatgtcggggatgaagcgttttgcaatgatgtggtcgggcaggcaagccaagtgtttccatccattgatatattggttaacaatgcagctgagcagcatgtccagcccagcattgaaaaaatcaccagccaccagctgatcagaaccttccaaacaaacattttttccatgttttacttaacaaaggcagtgctgcctcatttaaaaaaagggagctctattattaataccgcttcaattaccgcctataaaggcaataaaacgctgatcgattattcagcgacaaaaggcgcgatcgttacgtttacaaggtccctttcccagtcgcttgttcagcagggcatacgggtcaatgcagtggcaccgggtcccatttggacaccgcttatcccggccagctttgccgcaaaagacgtggaagtgtttggttcagacgtgccgatggaacgcccggggcagccggtcgaagtggcgccaagctatctataccttgccagcgacgattccacatacgtcacagggcagacgattcacgtcaatggcggaacaattgtgaacggataataaaaagccaatccttgaaggattggcttattcgctctgcttgagcgctgcatattctttagagagcgtaagaaacgcatctttatctttttcgtccaaggctttgttaatttggtccgtcagcatggcaagccgacggttatacaaggattcatcgagcaccatttgaatgtaaatatccgtcattgtgacatcgaattcttttgttttttgcgtgttgcgggacttcatgagctcagtgtacgattttttctctttcataaagaatccccccaatgccttttttatagtatatggataacggtcgaaaaaatcaataaatttttataatttttagacaactaatacttggcaatctatcgacatatcctgcaaaatgccgtaaaccggcaagtcttatgaaagtaaaatcggtttattactagtcatttagtaccgttaaatatcattaaaagatgattttatcttaaatgttaaaaaaacctgtcgttttacaaaaacagatgatagattattagtataaattttgcagaaaaaggatggaggccataatatgagtcagaaaacagacgcacctttagaatcgtatgaagtgaacggcgcaacaattgccgtgctgccagaagaaatagacggcaaaatctgttccagaattattgaaaaagattgcgtgttttatgtaaacatgaagccgctgcaaattgtcgacagaagctgccgattttttggatcaagctatgcgggaagaaaagcaggaacttatgaagtgacaaaaatttcacacaagccgccgatcatggtggacccttcgaaccaaatctttttattccctacactttcttcgacaagaccccaatgcggctggatttcccatgtgcatgtaaaagaattcaaagcgactgaattcgacgatacggaagtgacgttttcgaatgggaaaacgatggagctgccgatctcttataattcgttcgagaaccaggtatatcgaacagcgtggctcagaaccaaattccaagacagaatcgaccaccgcgtgccgaaaaggcaggaatttatgctgtacccgaaggaagagcggacgaagatgatttatgattttattttgcgtgagctcggggaacggtattagaaaaataggaaggagctgaccgaacagggcagctcctttcataaagctatgccgtcggaattcctccggtgatgccatatacctgagatgtcacatagcttgaattctctgaagctagaaatacataaacatcggccaattccactggctgcccagcgcgatttaatggagctggcggcgtgccttgtccgaatttcgggatgttttccgtcggctgtccgccggaaatttgcagcggtgtccaaattggtccgggcgcaactgaatttactctgatgcctttggaagcaagctgttttcccagtccgacggtaaagccgataatggcgtttttcgttgctgcgtaatctaacagcatcgggcttggattatagccttcaactgaggtagttgtaataattgaagctccctccggcaaatacggaagcgccgcttttacaacccagtaaagggaaaagacgttcacttcaaatgttttatagatttgttcagtaggcagatcttcgatgttttcgaccgcttgctgtttgcctgcaacgagcgctagcacatcaagtccgccgagttcgtgatgcgactgtttgactagatcttggcaaaaggattcgtcgctcaagtctccggggatcagcactgcttttcggccttctgcttcaatcagctcttttacctcttcagcatctggctgttcctcgggcaagtagttaatagccacatcggcaccttctctggcgtaagcaattgcggcagcgcggccgataccggaatcgccgcccgtgacaagcgcttttcgacccgttagtttacctgatcctttgtagcttttttctccgcaatcagggacaggtttcatgttcttttgcaggcctggcggttcttgatattgttcgggaaattcatcatgaaaaaatgcttttataggattcgtaagatttgaatcagacatcagcaacgctccttttctgtttggtgtacattcgtatgtgtacccctgagcataagcagaaaaacatgttttggcagtttgaatagtgaaggaaaaagaaaacaagaaaaaacaaagccttcttccatatttatcttgtcaaataagactatatgaattatgataaattcgagctataaatcaactaaatattgggtgttgggagagtgaatcgtcatgaaaaaagcggcggcggttttgctgtcactcggtctcgttttcggtttttcatacggagctggccatgtggcggaagccaaaacaaaggtgaaggtctataagaactgcaaggagctaaacaaagtatacaaaggcggagtggcccgcacatcgaaggtgaaaaacaaaggcggaaaaacgaagtacaagccttacgtttctaaggcgctttacgatgccaataaaaacaaagaccgcgataaagatcttatcgcctgtgaacggtaaataagaaaaagcaatctggtgtccagattgctttttctattgcttaagccgcctgatcggccgcagcgcttttcgccttccttgtcataaggctgactgccatcatgaccgtgatattcaaaagcagggcgacgatgccgacattcaagtcttttgcggcttgcggcagagccggaaataaagtgccgatcgtcgtttccgtcattgtaatataagtaactgctccgacacctgcaataatgccggcgaaagctccttgctttgtcaccatattatgcttgagcaggctgaacaaaagggcggggaatagctgtgtgacaaggctgtagcccatcaaaagcagcgtaacgatggtattcccgcctttgaaggtaaaatacaccgaaatcagcgcaatcaccggcactaaaaacttagcaagcgccgatacttgctgttctgtcgtgcggggcgcgattaccttgtacacattttttgcaaacagtgtggaggcggacattaagatcatagaccctggcacaagtgctgtcagcagtccggcagcaccgataattccgacaaaccaagggtcaaatgcttgcagagacagtctcaaaagcgacaaatccccgtctgcgccattcagatctggaacttgcaggatagccgcaaagccaacgaaaagaacgaagagcaggaccagctggtacaaaggcatgatgatggcgtttttacgaaacacttttgggttttcggctgaatacgaagcggaaaacgtgtgaggccacatgtaaaaaccaagcgctgtcaagagtacggttgaactgaaccaggccacactttgtcccgattcggggagcgtaagaaagccaggctttgccgtttcaatctgctgaaacatgtcttgaaatccgccgtagtaatgaattggcaaatacacacctaaaaacagaacgacaaccagaatcatgatgtccttcacaaccgatatccaggcagacccgtgaatgcctgaaaccataacataaaccgtgatggaaacagcgccgatccagatggcggcggtcggggtgattttgccgtacgaggtttccgatacaatcagcccgaggcctttcagctgcagtacaagatagggaatgagtgcggcgatgccgaccagtgaaacgagaatgccaagcagcggactgttgtatttttttgtgaaaaaatcagactgcgacattagtttatgctgtttcgcgtacgtccaaactgctggaagaagccagtaagaaaggatgtaggccagacatccgtaggcgatgatataaaaggctggaccgccctttccgtaggcccagccgctgccgccgagaaacgtaaaagtagtataaatttcgcctgccatcaaaaggaagacgaacacagttccgaagccgcgccctccaaccgtccactgctccaggttcatgtcttttcctttttgggcgcgtataccgagaaaaatactcaagagcaggacaccgaaaatgatgatgagagctgcattcattctgcttcctcctttttattttccttgtcgaggacatacacaatcgccatcagcgcagaggtcaaaagagcccacatcacaatataggcaagaataaacggcatgccgaacacgtagggggtcaccttatttgcaaaagggatgccgagtaagataccgataaagggcaaagcggcaagaacgtgaatcagtttcatagaatcctccttctatttaggattggggtgtacaagcccaagcgtactgaaaatgatgtcgcagatatggcagcacatgtcactttttagggtgaaaggctgtggttcgaattataaataaatttattttgtttgtatagtgtgaattgtctgaaattaatgctctgaatcgcccgaagagggaacgggcagtatgattcaaaaggctcggagtctgtccggggcaaatagatagtatgttaataattcgctgacctgctcacggattcgcggattaaaatagcgatggttttcttcataaccgtcgatgacaaatgtatagagcgtaaaggcttcatcgcgttccgtctcgcggattgcaatttttcttttcctcagttcttttctgacctccatcaaatccttttgtgctatttttaatgattcgctgataagctgtttataaggatgcttcaattttaatgtgctttcttcaattccggcgagatcacggttaaaaatcgtaatggccatgggcaaaaagagagcccgttcaattaaatcgtatatttcctcctgcagatttggcatgttgactccttctttctaagggaacgtttgttctatttgtattctatatcggctggtgaaatgtttcaagacagaaaaaatcaccaaaactttttagttttctgctgataatgtgtagaataaggatagacaaacccggtaaggagtataaatgttggagcattttttatcctatttgacacaagaacatttaactgaattatttcaaagctatagggctttcggtccgctcatagctgtgctgctgcctttaattgaagcatttctcccgtttttgccgctgatcgtgtttgtggtggcgaatacgaactcgtttggcttgtgggaaggattcatcctgtcttgggcgggatcaactgctggttccattctcgtatttttgattgtccgtcaatacggacagagaaaattgcttggatttatccgcagtcatccgtctgtaagaaagctgatgttatgggtggaaagacacggcttcggtcccatgtttcttctgctttgttttccatttacaccgtcagccgcggtgaatgttgttgccggtttgtcaaggatcggaacgcggccgtttattttggcggcagcctcggggaagcttgtcatgatttttatgatcagcttcatcggatatgatctgcacgcgctgattacacagccgattcgaacggtcatcgccgtattggtgatcactgtcttatggtatgtcggcaaaaaggtggagcggtatctgcatgtaagagccagtcagcgtgagcatgatggagggagacagtaacatgaaaaaacggttttggtttcttgccggtgtagtgtccgttgttctcgccattcaggttaaaaatgctgtctttattgattacaaggtagaaggcgtcagtatgaacccgaccttccaggaaggaaacgaattgttggtcaataaattttcgcatcgatttaaaaccatccatcgttttgacatcgtcctttttaaaggccctgatcataaagtgctgattaaacgggtaatcggcttgcccggtgaaacgatcaaatataaagatgatcagctgtatgtgaacggaaagcaggttgctgagccatttttgaagcatttgaaatctgtttctgccggcagccatgtaacgggtgatttttctttgaaagatgtgacgggaacaagcaaggtgccgaaaggaaaatattttgtcgttggagataatcgcatatacagcttcgacagccggcattttggtccgataagagaaaaaaatattgtcggtgtgatttctgatgccgaataaaaagacgctaatggaagaggcgtctttttgtatgccgtttggaaaaatgtgttgaagaaaaatttgtaaggagctataatcaaaattgttacctgtgtaacaaaatttatatattttttgattggaggtccgtttttattggtttttgttcgttttgtatgaaacaaaaggagtggtgaatgatgatgaaatatgaagcagtgattataggaggagggccggtcggatttatgctggcttctgagcttgcgatggccggagtgggaacatgtgtgattgaacggcttgaaaaacctgttccgcattccaaggcgttgacgctgcacccccgaacgctggagcttcttgagatgagagggattttagagcggttcgtatccaagggaagcaagatacctaccggacatttttcaatgctggatacccgtctggatttttcaggcttggatacgagctgtccttacacgcttttgctcccgcagtcaaaaacagaaaagcttcttgaagatcatgcacgaagcctgggaacagaggtgtttcggggtgccgaggcgctggcggttacggaaaacggggaagcggtccaaacaatttttaaggatcgggacggcagtgtacggacgatcacaagcaagtttgccgttggtgcagatggcgccggaagtaccgtccggaaacaggcaaaaattgagtttccgggaacagacagcactgtcaccgctgcgcttggggatgtggtgctcctttctccgccgccgtcaggcgtgctgtccctttgcacaaaagagggcggtgttatgattgttccgttatcttcagaccgataccgtgtcgttgtgatcagtccttatcgcacacaaatgccgaaagatgtgcctgtgactgagaaagagctgagagctgatctcctgcgaatttgcggaactgacttcggtttaacagacccttcgtggatgtcgcggttcgggaacgccgcgcgccaagcgaaacggtatcgggacggcagaatctttcttgcgggtgatgccgcgcatattcattttccagcgggcgggcaaggactgaatgtcggccttcaggatgcaatgaacctcgggtggaaactggcggcggccatcaaaggctctgcgccttcttggcttttggacagctaccatgacgagcggcatccggcagcggaagggctcctcagaaacacggaggcacagacaaagctgatcgatttcactcaagcaggcctccatttgcgaagcatgatgtcggagctgctggccttccctgatgtgaatcgatatgtagcagggcaaatttctgcactcgatgtcagatatgaagctgatcgtaccatgccgccgaatcgtttgaacggggcacggctccctgacatgaagctgattctttccgacggcagttcggaatggctgtacagctttctccaaaacgggtcattcgttttgctgtcattgaggcaggaagctgatgagcatatcgaagtgaaaggcttacgtacggtaaccgcctcgcttgcagaaccgaatgaaaagttgcgggatgtgcataccatattggttcgtcccgatggacatgtagcctgggcggtggatgcatcagcgcccgattgttccgaggtgattcaaaaagggatcagccgctggttttccgtcaccagccgagtataattcaattcgattgtttcatctgtaacaaaacggtatgatagaagaaacaatcgaatgaaaaaggatggaaaacccgatgaacacagatcatacgaaacgcaatctttttgaattgtatgcggagctcattcatcaacaggagaaatgggaggggcttattaaagcctttttatctgacgaattgaggaagctggatgtagagcacgggagtaaatctcaattgacgatgacagaaattcatgttctatcctgtgtcggggacaatgaaccaattaatgtcacgtcgatagcagaaaaaatgaatacgacaaaagcgactgtatcacgcatcagcacaaaattgctcggcgcaggcttccttcacagaacacagctcagcgataataaaaaggaggtctacttccgattgacgcctgctggaaaaaagctgcacagtttgcacaaatattatcatcagaaggctgaacagcgttttctgtcattttttgaccgctataccgaggaagagattctttttgcggaacggctgtttcgggatctggtgacaaaatggtatccgtcgtcagaagaaattgaaggggggcttcctagcatttttaaataaaaaacacgcactgaggtgcgtgtttttcgcttttttctatcttgttcaaggctgtaacgtaaatcagatttcatcttgaagaatgaaattcaagatgttctggaatttgcactgcttatacgatatgtctattagtatctttattttatacgttttttactgtgtttttgatgctttgttttcaaatgaaatagggtcttctgttttagttctcctaatctttacagaaatacctactagaatgaccgccatagttgtaaatattcccatggttaataagatcgtatcctgatttaaactccatccaattaagaaagagatgatcgctcctccgaaacttgccgaagcaataaataaacttgtaacttcgtcaacgtacttctgaataatgattgatgctagtgttaaagcaatgggaaatatgcccgctatacttaggccaatcaaaaatgtaccgcccaattgaagtattgggttacttatataagagaaagcaatcaacaaaacaattaaacaactacagctaaaaaggaggtatttagaaaaatcaagccttctacttacgaaaccaatcaatattcttcctatgatgatccctacccagaaaaaggagacacttataagactaatttgttcattgtcttggtttatcatgattgaaggtaaaaagttggcaaaatttgtttcaattccagcatataggaaagcgaaaaatacaaaaaagcctaattgctttgatttttttctatctcctataaagtattgaaatgctcctccatctggaaaggtcacttgttggttagcattcttagcgtactctcggttcttagacaagaaaattaaccaccctacgaataggacgaataaaaaggtgaatatacagtaatacggtaaaaaccagttattgatatctatgaaggaattaattaataatgggaaagataaagcgcctaatccaaagagaacttccagcttactcattttttctgcattactttcgaaattagcaataacaaatgaaccaactgtcgtttctaatgtgcctgccccatatcctaagagaaaagccattacaacaatataataccaatccttagttagaaaaaagatacttaacgctgcaagcattattgtcaaagctaaagtaagtgtcctaaaatgactgtatttcttaatcattaacggtgcgattaatactccgcttagaaatccggtaaactgaaagaagattatgaccgaaatatcatctgttgtcttgttaaaagactctaatagaaatggtgtcaaactccctgttgatatatggataatgcctactgtaaaaaagaaagcatatccaaataaatatgtccctcttaacattcattacacccctatatgaaaaagcaggaaaataaattcctgcttttttagtaacttctctcttcgaaatactagttgactgctgaaacagacattggttgagagttgctgtctttctcaaagaacatttctaatacttcctgagatctaaaaccatcactaaaagaagggatctcaacccaatcattctgagttgatgcaatccaattgattaactcgcttctaaaagaatcagcccatccataaaactcgtttggcggatcgtttaataggctttgcggtactgggcagtctaccacgttcaagccatctatgagcttgtaaacgtgaggattacctgtgtggtatttaaactcttttttgtgtccaactacctcaatgctaaaaccacagtcttcaggtacagaacattttgatgtgatgatatttacaaataccttgttcttcagctggccataaatttctgcatagtcatctacgagtacctgtttatcctcttttgtttttacatttgtgttcatttttgccgttactgattctgtgatgaaatcactctcaaacaaataccataccatgtcaataaggtgaatacccagatcccccaatgatccactcgtcttcttactgttagcgtcatctctccaagtaaacttcttacgcctaagtgcactatttttcttgaagtgtacttttatggacagtatgttacctagttcattattgataattaagctttttaagatatttacgtaagataaatatctataattaaatcccatactggctcttacgctcaacctttcagcagtatctttcattatgcttgcttcttcaagagaaatagccataggcttttcacacaaaacatgcttatgttttcctaatgcttgcaaagcatgttctttatggcaaaagtttggtgatgctacaattaaaccttctgaggcatcaattagttcatctacgttttcaaatgacttcccgccgaaagttttcacaaagctttccgcattttgttgatttatgtcatatacccctactaactctgcattttttattgtagataaagcagttgcatgcgctcttgcaataccacctgcacctatgatgcctatcttcttcatttttatttcctcctcatgatccaattaatttttttaaggtattagtaattccttttgagtactcactatcagttataaggtggtgcaagttttttgcttcctgtgttgcattttttagcagatatccattccctactgtctgtaacatacgaacatcatttccactatccccaaatgcgatagctctttcggtatttaggttgtatttctctaacataaacgttacaatttcattctttcctgtccctgtggggataaaatctacatcatagctgtcttctggatcgcctgctaagggattacaccgatttatatttactgaaacgccgtattcctcgcagattttttcaattgctaataggtttttcttgtcgtttatttcatcttgttcctgatagtagaagttatgcttataccgtgactttcctaattgagtttgaggattcaaaagaatgttatgattttcatgtagctgtttcacaagtttttcaaccttttctttactaaacccttcattaatgcgactgttccacttgttatcttgctgaccgaagttatgctctgaaaagtacgtaatttcagttccaagatcactagctataaaatgcggaaaatatctaaattttcctcttcccattttatcgagaatagattctatactgctcccagtaacccatccgattattagcttcccatctttacttttttgttctagatagtcttcgagttcatagatgtcttgttgcttttgttcgtcgattgtatgcggaaaatacgtttcatcaaaatcacaaaaaacaatatactgaggatgttcaaccgtggataacgttttatactccgatttcttgcttaataacatgaaacagtccctccattactctgtcttgttcttctaaagtaaatgacggatataaaggcaaatgcagtacctgactatgagccttttccgtatgaaccaattggagtcctgcatacttgtcctgtactaaaggagttttttgcatatgagacagtattggataatatacatctgtttgaacaccaaaatcttcatttaatttagtcatgatatctgcccgatcttctgttcttaccttaataggaaacagatgccatacatgatcttcacttaattctggtaattcaatatagcctttattctgcaactctgctaattgggtaatgtatctatccgccaagaacaatcttttgaagttgtttaatgaaaggtacttcattctctctaaaccaattgctgcctgtaaattgtccatttttgaattaaatccaaaattgatgactttcttattttttacatttacttcaaaaccgtgataactaaattgaatgcattttttagcgagttcttcattatcagttgctattgccccagccttgccacatacaccaaaattcttatagggattaaaacttaatgtagtgatgtctgcatactttcctaagtctgtcagtccaattccttggcaggcatcttcaattactttcaatttataacgatttgcgatttgacgaatatgctgcatgtctgaatgttttccgtataaatgcacaggtagaataaactttgtataaggagttattgcttcttcaattttgtcaggatcgatgcagaatgtttgtgggttaatatctacatagataggaacgcctcccaaagctaacacagcattttcagtagctgaaaagctattagccggcatgataacttcatcccctgggtttaatcctaaagccaataaacctatcataatagcatcggttccactgctggttgcaattacataccttttatgtaaatatgtagataaaactttttcgaattgctctaaataggaaccactcgtaaattttccagttggcaaaacttcagttaatgtatttaagatatcttccacttcatcattggttattaatctgtctacaggcaaaaaagggactttactgatttcacgatttttttgatagttgaaaagatcatgttcaatatctatcttttcttttaatacttgtttccaccgctcgtttacaatactgtcttcaataacaagttcttttccttgtacgtcaccttttaagtgttttaatagtgacatgttttctttgcttttacctgaaatcttaacctgtttttgcatgaacagtacctccaatgattttataatctaaaaatttattacaaatttatcctagtttctgaaatcggtaacatgtcaacaacttttttaaggaagggaaaatatgcctacaattgatgaaatagcaaaattatgcaatgtgtctaaaaccacagtgtcaagagtattgaataatcatccttatgtgtcgaaagaaaaaagagatatgatcttaaaggctattaacgaacttgactacactcccaattatttagctcggaattttaggagaaataagacacaaacgatagctttatcggttccgagtatcgaccatccattttttgctcaattaataaaaggggtctctcatgaagcactgtttaagaattacaaggtaattgtatttcagaccttttatgacaaacagacggagctagaattactagagttattgaagcataaagaagtggatggcattattcttgggactttagaaaatgaatgggatcagatatcccctttcttaaagtatggtcctatcttattatgtaatgaatatcatcactcagcggacatcacgataattgggtatgatgaatttgaagctacatacatgggggtagtacatttaattgaaagagggcataaaaaaattgggttttgttttgatactccatatagcgaagctcaatgtcagaggaaagagggttatttgaaagctttacaagattacgatttacatcatagaagcgaatggatattcggcgaaatgtttaatatcgaggatggctttcgtgtttttcataagataaaggatctaaaggacagaccctcagcaatatttacaggaaatgatcaagtcgccgcagggattattaaacaggcgatgaaaaatggctttaaagttccagaagacttagctgtaattggttttgacaaccaattgatctgccaagtcgttactccgaccataacaacaattgatatccccgtaatagaattaggtcaacaggctgtgttgaaaatcatcgagtccatttcgggtaatgccactttaaacagaagaattattaaactgccaacaaagcttattataagagaatcaacgtaacgatagatttccctttatcattttatatctttatataagaaaaagaggttattcattttaacctctttttcaatcgtaagtcgtcaattatttctttcatttcaccctctggcagcattcacttcaaacctgatccattaacaacgaaatatccgcttatatttcctcatctcgatggtttgcgaattaaaagttcttgaacccttttttcaactaggcactactgccgctgattgagctctttttgtcttttttttcaccatgaagatggtgaagcaggcgataaaacggcggcagcagggcaataaccagaatgacgcgaatgacctgaaccgcaacgacaaaggtggaatcagcatgtaaggtaacagacgtcgtcgccatctctgcaatcccgccgggcgcaaatgccagaacagaagtgatgagcgaaattcctgtcagctcggaaacgatcacggcgctcaaaaacattgctgcgattaaaccgacggacgagacaaacccgacgatgataatacgggtgacgccggcaaacatgcttttatacatcttagagccgatcgttgccccgagaaatacttgtgatacatggttagcttgtgacggccaccatgccgtcatgtcgtgccctgtcaccgcagctccgccaacatgtacaattgctacaccgagcatgctgccgagcagccatggagctggaaattttaaaaatttcgcagctttgcaagctccccaggcagcgagaataagaatgacggtccacaaaacgggagcgagcctaaaatctgtcgttgcagaagaaatcgtctctgctgcggcacttgcggtacgatcttgttttgtatagatcagaatgactaaaaacggaatggaaagcaccacgagcagcacacgcatcatttgaacgaggctgactattgcggtattggcgcctacttcctgtgcgatgctcggcatggcggaaagcccgccgggagcggtgccgacaaagctagtcatcatatccgttttgctgaaacgccaaagcacatatcctgacagcatggccagcaggatagacaatatcagcataacgccgactgaaaaccaatggtctttgagaacagagagaacggataaattcagcttttggcccaattcaatgccgaggatcatctgcccgagggcgagccatcgtcggttaattcctttttggtctggtgccatcatcagccatgccggccgtatcatggcgaggcagcaggcgacaatcagtgttccgatcatccatccaattgatattccggttaatgaaagaataaaccccccggctgcactgattgcgataaaccatagatctttgaggagattttcgtctttcttcaatgtaaaacccttcttcctttttcacgtaacactccaattgttcacgtagtgaatgtatttattactatagtatatttttgttgataaagaaattatgaattattttctataagcgattcacttttcttatgaccttgtgttcgagcttttctattgtgtaagtcagagataaacccgctgtcagcagacacacggcaagagcgtaaaaaatcacttctccgccaaatgatgtcaggatcagcccgcctgccagcggtccgattgagcgggatatatcccaatgcagaccatagacagcataaaaccggcccagcaaatgaggcggcgccaatttcgatatgaaggtctggatgtgggttagcccgatgctttcgccaaccgtcatcaccgctgccgtcactaaaagcattgtcagggaggttgagcatgcaaaaccggcagccgcaagggagtagcaaatataagtaatgaaaaggattgttttcattgaaagcttttcggtccctttgacaagaggtacttgaagaacacagctgaataaagcttttgctgctgaatagatggtcagcatggacagataatcagaaaacatgtttttgctgaacagcctgtatgttgtttctgattgtgcatataacatgctgatggggagagaaagcagcaaaagaagcaggacaggcctgtatatcgtaaagctcgcggacattttcggggtaacagctgggtgtagcggctttgtctcaggcagtttcagtgcagcgatcagaaagtagataaacaatgccgcagcatctaatgcgaatatccacacggggttatgattgtacagcagcatccccactagcggtcctgccgtcagacccgctgaatagatcgcattgatgaccgcaaacacttccgaacgtctgctttccggcgtgctttcagcgatttgggcgcgggaagcgggaatgtacaacgatcttccgatgccattcatgacatagagaatagcgaaaacatacgcatgctcagcaaatataaaccctgtcattgccgctgattgaagaagcaatgcggtcaaaatcgctgtgcgccgcccaatccggtccgccgcctttcctgcagcgagcgtcaggaaaatatcagcaaatggctgaaggctgatgatcagcattggcatcatgatactgccgtttaattgttcatgcagatacagcaccataaaaggtcccatcattgcacctgtcaggcttgtcagcaattcgccgaaaaagcggagccgaacgggagcggtatatctcgattttatagagtgaaaactggtcaacatgtgatcgccgcctttcgctgtttgatatagtagtagtgtatagaaggggcggcggcccaaaaagtgaagaaaagaagagataaaagttccccttttgtcgggaggtgcggggattgaagctgatagagcactacgtggcgcttgtaaaaacaggctgcgccgagtatggacaaatgaacgaaatgacactcactgagattgccgactgtttattttgtacagaaagaaatgcaaagctcattttacataagctggagaacagcaattggattatccggaaaagcggggcggggcgcggccgcaaatctaaaatcgcgtttcttcggaggcctgaggaactgcttcttcaaactgcaaaggaatataccatgtcaggaaagcttaaaaaggcaaagaagctgcttcagcagtatcagtccgcgtttccggggcttcaaaacgaatataacatgtggctttcagaggtattcggatttgtgacggagacaggcgagaatggggcgaaggatgttctgcggctgttcatcacgcccgaatctgtcagcagtttggatccatgccaaatatttttgcggtctgagggccatttcgtcaaacagatatttgatacactcttcacgtttgattcggatatgcaggagccaaagcctcatttggttcatggatgggaagaggtcgaaaaaaaacaatggagattttttcttcgaaaaggtgtgtcatttcataatggacagccgctgacatcgcgggacgttgcgtttacgtttcagcgctttttggaactgggtgacaacccgtataaatggcttctgcacggagtgaaacaagtcttagaaaagggcccttattgtgtggcgctcatactcgataggccgaatgcgcttttgccgtatgctctttgtgatgaacggctgtccatactgccggcagaacagggcggcgggaaaaatggaacagggccttttcaggtgaatcagcaacacagcgggatgcttgtgcttgaagccaatgagcgctacttcaagggacgcccctatttggatcgcgttgagtttgtgttttctgagcaagccggagagatgaacggttttaccattcaagaaaaacaaacatgtcctgagcagcaaactgtttttgatgagcggcatgttcagtatttgtcgctcaatctgaaaaagaaggggcctcttcagcaccaaagctttagaaaagcgctccggctgctgatttcctctgaacggctcgttcgtgaagcgggagggcaccgaagaatcccggttacgtcctttttgcatccgagttcttttgagtgggagggcgtttcgccatctgaattgttgaagaaaagcggttacgagggcgaaacaatcgtgctttataccttttcggaaacggatcatcgtgaggacgccgaatggattcaaaatatttgcgcccagcacggtatcaggcttacacttcaattctgtgatgctgctgatctgcgacggccggaaaccgtgcagatggcggatatcattcatgacagtgcgacgttttatcaagacagcgagtttggttttctgcatttgctgctgtcggagaacagtttcttgtatcagcatctatctgaaaagctgacacagatttgctcaggaatgatagagcggatgttttccatgcctgatcgctgttcgagaatcaacatcctgcgtgacattgaccggcagatgatacaggagctgaacgcgatcccgctgtatcaaaatgtgctccaggtgacatcaagtaaaaatgtaaaaggcctggtgcttgatgaagagggatggattgatttgtactccgtatggctgtccaaataaaaagagggttcttttttgaaccctcttttttaaactgccatgctgcggcattgttcagcacaggcgaagcaggctttcgcacatgcttggcaatgatcatgatcgtgctttccgcattcagtgccgcatgcttcacaaatatcggcgcaaagtgcacaaatttctttcataaacgggctgtccgtttgcatggctttgaccgccagcgcgcaaatatccgcgcattccctgtcaagccggatgcagccgctgagatgatgctgcacgctttcttgcaagcatttagtgaaacaatgattgcaagccttcatgcaatcgatgcaagcctcaatacaagcttcagaatattgctccatggttgattccccctgtatgacagtatatggttttatgtttcccggctgcatttgaaaaaaacaggggagtgtgtttttagctaaggggatatgtacatataccctgaacgggtatatctaaccatcagatagtataggaaccagacagcgtgattttgttcatcacgtgctgcgcgcgtaaagacgcctttcgcttttaagtttgacgtttcctcggccgcacgcaagtaaaagtcgacggtttcttgttcatctttaaaagcggcatccagtcctcttgtgaaattgtccgggcattcttccgtttgtttcggcatgatgtgtttgccggtaattgaaccatacagtgtggaaaattcacggaggtggcgaatctcgtcacgcctgatttcttcaatctgttttctgacctcatcgctgtgggcgagttcggcgagcttgcggtagcattgaatggcactgaattctccgttgatggccttctgcaaatttcgaatcaaaacaggatcttccctgtatggcaccggatagggatagtagctgtaatgcaaggggattcaactccattcttaggaattgggcttctgtaaaagtatatgttgggcagggagagatgtgcggagataatcagctttttatatgtgaaaaggccgtttttaccaatagatcagattggtcattttcgtcaacattcgataaaatatatagagataaaaagagaggggtcttctaatttgggagcagagtttttagtaggcaggtccgggagtggaaaaacgaagctgatcatcgacagcattcaggatgaattgcgccgggctccattcgggaagccgatcatttttctagtcccggatcaaatgacgtttttaatggaatacgagcttgctaaaacgccagatatgggcgggatgatacgcgctcaagtgttcagtttttcacgattggcctggcgcatcctccagcatacgggaggaatgagcaggccgtttctgacgagcaccggcgtacaaatgctcctgcggaagctcatagaggagcataaacaggagttcaaagtctatcaaaaagcgagtgacaaaagcgggtttaccgcacaggttgagcggatgctgacagagtttaagcgctattgtctggaaccggaggatatccgccggatggcggaaagcggaacggcttccgagtatcgcggagaacgtgttttatctgaaaagctccatgacttatcaattctgtatcagcaaatggaaaaaagcctcgcagatcaatatcttcactctgaggattatttgacattgctggcagagcatatcccgcttgcggaagatataaaaggcgcccatatctatgtggatggcttttatcagtttaccccgcaggaattcagggtgttggagcagcttatggttcatgcggagcatatcacgttttcgctcacagcggacaagccgtcatatgagcgggagccgcatgaactggaattgttcagaatgacggggaaaacctattaccgcctgcatcagaaggcgaaggaactgaatttggacattacgtataaagagctgagcgggactgagcggcatacaaagacgccggaattggcgcatctagaggcacagtatgaagcgcgtccggccattccatacgcagaaaaacaagaagcccttactgtgatgcaggccgcaaacagacgagctgagctggaaggcattgctcgggaaattcacgccctagtcagagagaagggatatcgctataaggatgtagcaattcttgcgcgccagccggaagactacaaggatatggtgaaggaagttttcgcagattacgagattccttatttcattgacggaaaagcatctatgctgaaccatccgttaattgaatttatccggtcgagccttgatgttctgaaagggaattggcgttatgaagcggtgtttcgctgcgtgaaaaccgaactgctattcccgctcaatgaaccgaaggccaaagtgagagaacaggtcgatcagctcgaaaattactgtatcgcctatggtattaaaggcgaccgctggacaaagggcgatcggttccaatacaggcgttttgtgtcattggatgatgattttgcgcagactgatcaggaaatcgaaatggaaaacatgttgaatgacacccgcgattggattgttccgccgctttttcagcttcaaaaacgcatgaaaaaagcgaagacggttcaagagaaggcggaggcgctctatcgttatttagaagagacggatgtgccgctgaagctggatcaggaaaggcagcgtgctgaggatgacggcagaattattgaagcgcagcaacatcagcaggcgtgggacgcagtcattcagctgcttgaggagtttgttgaaatgatgggagatgatgagatttctcttgatttgtttcagcaaatgatagaagccggcgcggagtcgcttacattttctctaattccgcctgcgcttgaccaggtgtttgtcggcaatatggatttgtccagaatgtatggcacctcctgcacctttgtgctcggggcaaacgacggcgttctgccggcacgccctgatgaaaacggggtcctgtcggatgacgaccgggaatggctgaaaacgattggggttgagctatcctcaggcggacgagagcgtttgcttgatgagcacttcctcatctacatggcgttttcaagtccgtctgaccggctttacgtatcgtatccgattgctgatgcagaaggaaaaacgcttttgccgtcgatgatcgttaagcggctggaagaactgtttccgcatcataaggagcgcctgttaacaaatgaacctgaacaggtcagcgatgaggaacagctgatgtatgtcgtgaataaaagcgtggcacagtcctttaccgcgagccagctcaggttatggacacgggaatacgacatcagcgacgtctggtggagcacgtacaatgtgctgatgagtgagccggacaggctgcagtcgaaaaagctgttctcaagcctgtttttccggaatgaagtgaagcagcttgaacgcagcgtgtcgagacagctctatggtgaacgcattcagggcagtgtatcgagaatggaaacctttaacgcatgcccgttttcccattttgcgtcacacgggctgcatttgaaggaacggcaattcttcaagcttgaagcaccggatatcggccagctgtttcattccagcttaaagctgatttctgataggctgcgtgagcaaaagctggattggcgcgatttaacgaaggagcagtgcgagctgttttcctatgatgcggtagagcggctggcaccgaaactgcaaaaggaaattctgctcagctcaaaccggcattattatgtgaaggaaaaactgcaaaaaattgtgacacgtgtgtccggcattttaagcgagcatgcgaaagcgagcggattcgtaccgatcgggcttgaactgggctttggaggaaaagggccgcttccgccgctgacctttcaactgaaaaacggctgtacgatggaactcgtcgggcgaattgaccgtgttgataaggctgaaagctcaaaaggcctgctcctcaggattgtcgattataaatcaagcgacaaaggccttgacttagcggaagtatattacggattggcactgcaaatgctgacgtaccttgatttatcgattacacattcagctgactggctcgggatgagggcgacgcctgccggagtgctgtatttccatattcatgacccgatgattcaatctaatctcccgcttgggcttgacgagattgaacaggagatctttaagaaatttaaaatgaagggcttgctcctcggtgatcaggaagtggttcgcctcatggatacaacccttcaagagggacgttcaaatatcataaacgccggcttgaaaaaagacggctctctcagatcagactcagcagcagtcggtgaaaaggaatttgatcttttgacaaagcatgtgcgccgcaccttccaagaagcgggcgaacaaatcaccgacgggcgcgtatccattgagccgtacaaaatgaagaacaagacgccgtgcacatactgtgcgttcaaatcagtatgccaatttgatgaatcactggaagaaaacgagtatcgcccattaaaggctgaaaaggacaagacaatacttgagtggataaaaaaggaggcggatggcaatgaacattcctaaaccggcagacagcacatggacagatgaccaatggaatgccattgtttcaaccggccaggatattcttgtggcagcggctgcgggctctggtaaaaccgctgtgctcgttgaacgaatgattcggaaaatcaccgcggaggaaaacccaatagatgtagaccgtcttctcgttgtgacatttacaaacgcctcagcggcagagatgaagcaccgaatcgcagaagccttggaaaaagagcttgtacagcgccccggctcgctgcatattagacgccagctgtctcttttaaaccgggccagcatttcgacgctccattccttttgcctgcaagtgctgaagaaatattactacttgatcgatcttgatccgggctttcggatagctgatcagacggaaggcgagctgatcggggatgaagtgcttgacgagctgtttgaagacgaatacgcaaagggcgaaaaggcgttttttgagcttgttgaccgctatacgacagaccggcatgatctggatctgcaatttctcgttaaacaggtgtacgagtattcccgatcccatcccaacccggaggcgtggctggaaagctttgttcatttgtatgatgtatcagaaaagagcgccatcgaggagctgccgttttatcaatatgtcaaagaagatattgcaatggtgcttaacggggcgaaggaaaagctcttgcgcgcgcttgagctgacgaaagcgccgggcggcccggcgccgcgtgctgacaattttcttgatgatcttgctcagattgatgaactgattcagcatcaggacgatttcagtgaactatataagcgggtgcccgccgtctcttttaagcgtgccaaagcagtaaaaggggatgagttcgatccagcgctccttgatgaggcgacagatttgaggaacggcgcaaaaaaactgcttgaaaagctcaaaaccgactacttcacgcgaagtcctgaacagcacttgaaaagcctagccgagatgaagcctgtcattgaaacgctcgtacagcttgtcatcagctatggaaaacgattcgaagctgcgaaacaggaaaaatcaatcatcgatttttcggatttggagcattactgtttagcgattttgacagctgagaatgacaaaggtgaacgtgagccgagcgaggctgcaaggttttatcaggaacagtttcatgaggtgctcgttgacgaatatcaggataccaacctcgtgcaggaatcgattctgcagctcgtcacaagcggtccggaggagactggtaacctgtttatggtaggagatgtcaaacagtcgatttatcgattcaggcttgcggagccgcttcttttcctctctaaatacaaacggtttacagagagcggagaaggcacggggcggaaaatcgatttaaataaaaatttccgaagccgggctgatattttagacagcacaaactttttatttaaacagctgatgggcggcaaaatcggtgaggtcgattatgacgagcaggctgagctgaagcttggtgcagcgtatccggacaatgacgagacggaaacagagctgctgctgatcgacaacgcagaagatacggatgcaagcgaggaagcagaagagcttgaaacggtgcagtttgaggcaaaagccatcgctaaggaaattcgtaagctgatttcatcgccgtttaaggtgtatgacggaaaaaagaaaacacatcgcaatattcaataccgagatatcgtgattttgctccgttcgatgccgtgggctccgcaaatcatggaggagctgagagcacagggcataccggtttacgccaatttaacgtcaggctatttcgaagcggtcgaagtcgccgtcgcgctttctgtgctgaaggtgattgataatccgtatcaggatataccgcttgcctctgtgctgcgctcaccgattgtcggagcagatgaaaacgagctgtctttgatccggcttgaaaataaaaaagcgccgtactatgaggcgatgaaagactacctggctgctggtgaccggagcgatgagctttatcaaaagttaaatacgttttacggacatctgcaaaaatggcgcgcgttttcgaaaaaccactcagtatctgagctgatttgggaagtgtaccgcgacaccaaatatatggattatgtcggcggcatgccgggcggaaaacagcgccaggccaatttgcgtgttctttatgacagggcgcgtcaatatgaatcaacggcatttcgcggcttgttccgtttcctgcggtttatcgaacgcatgcaggagcggggcgatgatcttggtacggcgagagcgctcagcgagcaggaggatgttgtccgcttaatgacgatccacagcagcaaagggctcgaatttccagtcgtgtttgtagcaggtctcggccggaatttcaacatgatggatttgaacaaatcgtacctgctggataaggagctcggatttggcacgaagtatattcatccgcaattacgcatcagctatccgacacttccgctcattgcgatgaagaaaaaaatgcgcagggagctgctgtcagaggaattgcgtgtgctctatgttgcattaacgagagcgaaggaaaagctgtttctgattggctcatgtaaggatcatcagaaacagcttgcaaaatggcaggcatccgcgtcccaaactgattggcttctgccggaatttgaccgctatcaggcgagaacgtatctagatttcattgggccggctcttgccaggcacagagacttgggggatttggctggtgtgccagcacacgctgacatctcaggtcacccggctcgttttgccgttcaaatgatccattcctatgatttgcttgatgatgatctggaagaaagaatggaagaaaaaagcgagcgcctagaagcgatccgccgaggtgaaccagttcccggctcgtttgcgtttgatgaaaaagcccgcgagcagctgagctggacctacccgcatcaagaagtgacgcaaattcggacaaagcaatcagtttctgagatcaagagaaaaagagagtacgaggatgaatacagcggcagggcccctgtaaaaccggctgatggaagcattctgtacagacgtcccgcttttatgatgaaaaaaggcctgacagcggcagagaaagggactgccatgcatacggttatgcagcatatcccgctgtcacatgtgccgtcgatagaagaagctgagcagacggttcacaggctttatgaaaaagagcttctcactgaagaacaaaaagacgctattgatatagaagaaatcgtgcaatttttccatacagaaatcggcggacagctgatcggtgctaagtggaaggaccgggaaataccattcagcttagcgcttccggccaaggagatctatcctgatgcacacgaggcagatgagccgcttttagtgcagggtattattgactgtctctatgaaactgaggacggattatatctattggattataagtcggaccggattgagggcaaattccagcatggatttgaaggagcggccccgatcttgaagaaacgatatgaaacgcaaattcagctgtacacgaaggcagtggagcaaattgcaaaaacaaaggtaaagggatgtgcgctttatttctttgacggagggcacattctgacattatagcgagatccataagctccggaatttcaggcggagcgggtctcgttttctatataaaagagaggtgaaagcatttgcggattttacatacggctgactggcatcttggaaaaacgcttgaaggaagaagcaggctgagtgaacaggccgatgtgctggatgaactgaatacgattgtaaaggatgagcagatcgatgccattgtaatggcgggggatgcatttgacaccgtaaacccgccagctttagccgagcagctgttttatgaaagcctgtctgcgcttagcgacagaggaaagcgcccgatcgtcgtcattgccggaaatcacgataatcctgaccgtttgtccgccgcttcaccgctgacacatgaaaacggcattcatttaatcggttatccgacaacagagccgattcatattgaagtgccttcagcaggagagcttttggcggttggagcgctggcgtacccatctgaagcgcggttaaatgaagtgctatccgatacgtttgatgaaaagctgctccgtgatcactatgatgtgaaaatcaggcaggcgtttgagcatatgacaagccggttccggaccgatgcagtgaagattgccgccagccatatttatgtggcaggcggaaaccaaaccgattcagagcggccgattgaagtcggcggtgcatacacggtggctgctgaaagcctgccggcagatgccgcttacgttgcgctcggccatttgcatcgcccgcaaacgatcaagcgggcgcggacgcttgcgcgttattcaggatctccgctcgcctacagcttttctgaagcgggctacgctaaatcagtgacgattgtggacgcaaagcctggggaagaggccacttggcaagaggtgttattatcaagcggcaagccacttgtgaagtggaaagcggcaaatggattaagtgaggtgtacagctggctggatgaaggcagagatcagaatgcttggattgacttggaaatccgtgtcgcggaccagctgtcacttgaagagattcacaggctgcggaaggcgcacccgggctttatccatatcaggccggtttttgaagaacagaacaaagaccgggaacggatcgaggttaaacatgtctcaatcgaggaccgctttaagaaattttatgaaaaacaaactggcggtgcggtgccggatgaagaaatggtgaagctgtttttagagcttgcatcaggcgttgaagaggaggatgcgaaatgaagccgatcgccttaagcattaaggggctccacagctttagagaggagcagacgatagattttgaaggcctttccggtgccggtgttttcggcattttcggcccgacaggaagcggtaaatcctctatactcgacgcaatgacgcttgctttatacggaaaggtggaacgggcggcgaataatacgcacggaatcttaaatcacgccgaagatacgctgtctgtgtcctttacctttgcgcttcagacgaatcaccaaatctcatacaaagtcgagcgtgtgtttaagagaacggatgaaatgaaggtaaaaacggcactttgccgcttcatcgaaatcaaggacgagcatacggtgctggctgataaagccagcgaagtgaataaaagagtggaggagctcttagggctgacgatcgacgattttacgagagcggtggtgctgccccaagggaaatttgctgaatttctgtctttaaaaggggcagagcgcaggcatatgcttcagcgtttatttaatttggagcaatatggagacaggcttgtgaaaaagctgagacggcaggcgcaggaagccaatgcgagaaaaaatgaaatgcttgctgaacagtccggtctcggtgaggcgagctcagaggcagtggagcaggctgaaaaggttctcgaacaagctgaagcccggctggaagcgatgaggaagaaccgtgatcaggcgaaggagcggtttacagagcatcaggagatatggaatgtccaaaaggaaaaatccacttatgaagaagaggaaaaacgtctcgcagaagaacagccgcatatagacagcatgcaaaaacgcctgctggaagcagaaacagcagcagcccttaaaccctatgcggaccggtacgcagaagcgatccagcatgaggagcaagctgaaaaggaacaaacgctagcccaaaaggatttagcagaccggacagctttctttcagcaaaaacatgaagagtatgaagcgtggcgccagcataaaagcgagaaagagcctgagcttttaacagagcaggaacagctttcacgcttgcaggaaatcgaaatcaaactgagtgaggccaagcaagaggaagagcgcaaaaaggctgacctccggcagaaagaagcggctcttcaatctgtcatgaatgaattagaggccgtaacagaccgcctgacacgagggcaaaacagacagacagaattgaaacagcagctcaaatccctgcaggtgacatccgatgagcgaaaaagctgccagcaggccgcagaaatggcattgcgcatcagacaaaccgaggagcaaatcaaaaaagagaaaaaacgaagtgaagaattgaacctcgtgctgcagaagatgaatgaagagaagaatacactcgttcaaaagacggaagcggaagaaaacaacatcattcaggcatatgaggctgtacaaactgtgtaccatttggtgtgcgaaacggaacgctcattaacacatatgacggaagaggctagaaagagtcaacacacgcttcacttacagcgtgaaaaagcaagggtggcactgctgacaaaagagttagcccaaaagctgactgccggtaagccttgcccggtatgcggttcaaccgatcatgatccatctgcctcagtacatgaaacatatgaagccgacagccatcttgaagaggacattaaacggacagatgtattattgacggaagctgcagctctcagccaggagattctttcagccaaaattacgcttgaagaacagtccgcgcgctttattgaacagtgtccgtttttgcagacaattcaagcacagaaccttgaagcggcagcttccttcgaacatcagccggtgtatgaagcatttgaaactgccaaatttgaatggaaacgaatcaagcaggacattctttctgttaagacacgaatggcacaaatgattggcgcctatcaggagtctttaaaaaaggccgagcagcttaatgaaaaaatcggttttgaaaaaagagaagctgaccgtattgaaagcatcatcagcgagcttcaatcctcaatggacagcagtctgaatatgtttaaagaagcatttcagaatcaatctgtggacgaagcagaaaaatggcagcaagccattgaagaaaaggaccgggctgcagaagaatgtgaaaaacgaattgagaagagtatcgcgtttcttgctgagcatgaagcacaaaaggaaaaactgcgggaatctggacaccggcttgaacgggaaaagctggagcttcattatgcggctgaacgcatcaagagcgtgatagctgattatgagcacgaactcggagattatgcaaaaggagattcgattcaaatcaaactccgctctgtccagcaggatctaaagctgttaaaggaaaaagaacaatctttatatgaagaactgcaaagcgcccaaatgaagctcaaccaagcgaaaagccgcgcttcggcaagcgagctcactcttcaagaggcgaagggcagattggaaaaagcaaaagctgcttggcttgagcatacaaaaaacacctccattacccggactgaggaggttgaacaaagtctcatcccagctgatgaacttgaaaagatgaaaaccggcatagaccagtttatggataaactgaagcaaaatgctgcaaacttaaaacgagtagcagagatacttgccggcagagcattatcagagagcgaatggaacgaaaccgttgcagcattacaaaaagctgaggacgcatttggcgctgctatagaggaaaaaggcgcggcagcaaaagcactggctgtcattcgcgaccatcataaacggtttaatgaaattgaagctgaactgaaaaaatggcagacgcatatcgacaggctggacaagctgcaagctgtgtttaaaggcaataccttcgttgaatttttagctgaggagcagcttgaaagcgttgcgagggacgcctcagcaagactcagtatgctgacaagacagcgctatgccatcgaagtagattcagaaggcggcttcgtgatgcgggatgacgcgaatggaggcgtaagacgcccggtttccagtttgtctggaggagagaccttcctcacctcgctttcacttgctcttgcgctgtctgctcagattcagcttcgcggggaatacccgctgcagttctttttcttagatgaaggcttcggcacactggatcaagatctgcttgatacggttgtaacggccttggaaaaacttcagtcagacaatctggctgtcggtgtcatcagccatgtgcaggaactgcgtgcacggcttccgaaaaagctgatcgtccatccggctgaaccgagcggccgcggtacgcgggtatcacttgagttgatgtaagggaggagcggatatggcaaagcagactgccggaatatgtgagctgtgcggccggagcgatgtccagctgacagagcatcatctcacaccgaaagaggaaggcggaacgtttttgccgacagcgatgctctgtattccttgtcataaacagattcatgccttatataccaatcaagagctcgccgtacgtttaaacggaatggctgaactcagaagcgatccagagcttgcccggtttgtcaaatggatcagaaaacagccgcctgagaagctgatcaaaacaaagaaatcaaatgaacgaaaaaagaaaaaatgactaaaaagcagccctctctttgcagagcggctgcttttatccgtttccaaccatatcctgatcgttgacatcggggtctatataatttgtcgcgttgactgcattatttaatagaaggaaatctcccgtgtttcctgctcccgaaccgagcgcagattttgaagagcttttcggagaaaggtaaaaggaatcaccaaagtttacgactccgcccgatatggaattgatagctataggcccgacaattgctggcataaacgacaccctttatcgaagtctctgtttattatatgttcttggcgggcgattgtgagcgcggagactgaatctgtctgatatgtttgagtctcgcatcaccgcgaataagcgaagctgatccggcatgtaaaacagaagaggctgagaccccttgaattttgatgctgcgaacataaatagccggcacctcgtggcaaaacgcgctttgtacacctgtttcggggagcggcttcacagcctgctgctgaaagatctgatactcctttttgttaaatgagccttcattatggtaaaacgtggacagagaacgctgcacagcaaatacttttacactcatatcgatttcatttgtgtcgccaacttgaaacacacttgcgatcccgagggaattaaacttaactagtctgatgcgcgatatgcgtttaagcattattctggcgcaagcggagcaaacggcccaataataagagattcaggcggtgtatcaaaaatagaagacaggtaaatggattcagtgtctccgatgtggaaaacggaggaactggacacaccgttcatccggatgtccccgacttctaagctgcggttgatgactgtaaagatcatgcttgctcatctcctttcatttctgatggaatatgctccagaaagtgttctacagcgcggatgacatcacgcttcacatgctcagcgatatgttctgcatattgtgcaggcggtgtatgttcttcttttttgatatgggacatataataatggattcggctgtccatttgttttctgatgtcttcaataacatgatgtctgtttgtatcgtcaagtctgctgtcatattggttttcaagctgttccaaaatatctgggatttcctcggttaagtacatgtcgacattctggcggatctgctgcatgagctgagcgctctcttcctgctgcatcatcccgatttgcggtgtcgactggctgacgtcaaagttttggacgctgttcgggtcagtcggatttaaaccgatgttcaaagtcccgtcgagcctttcgattttcagctgatcaaatttatactccacacgctcaatggtagtggccggccgctgtttcatcgtattcatttcagtttgaatctctttcagctgacgttcgagctgctgaatgtgaatcgcctgctgctgaacgaaggaattcaagttttgcaggtaagaggaaacagattgatcatacatgttcttcacctctttcatatgattaacggccaggaggctggagcgggaccaatgaacctgtgtcgggctcctgcagctggagcggttgccctgagccagaaacttctggtgccggttctacatagcttcctgtattatacaaatttgacagtgacttgattgatccggcgctcccgatttgcagaatggaggagttgctgattgattccagccggagatagttgatttgaatggtttgattaatatagaagttcatgagcctcactccttttacgcattggccacgatcggctgatcaaccgcatcattgtcatacacattcgtcgcgttttgataattcatcaccttgaggctgtcgccggtattaaagctgccagcaccggcaaacgttctgacctgagcctgaggagaaatcgtaatgcagtccccgatgtgaacgactccgctcgtaccaatcgcattaattttaaacgctccgacaatggccggcatacgagcacatcctttgttgaaaaattaaaaaaagacaggtaaagtgaaatgacaattctgatttcaattgggctattcacgatagcttatgacaaacgcacatatgtgtgagagaaatttaaaggggacatatcggctctttatgaaagcgctttattttttcgggccgttatgtttaaacatggcaaaagaggatgttgggtataaattgagcggaaatgcggcgaaggatgccgctatccgcctatggtgatttttgtttatttctttggtgtttttgcgtgtagaatgctttttggagtatgtcgtgctgcggtattcgatttttgggcgggcacattctcgccctgaggtatatcccagaagtgctgagcaaaaagcggagttacatgtggtgtattctaattgttatagaaaatgatttacatacgggagttttcaagatatctcccaaaaatcatttcttctttaatccgggtattcagcaggatatccagctcttggctgcattgaatcgtttcttttgaattcatgccatatttttgtgcggtttcaattagtgtgatcctcatttcttcaattttactgttcattacgctatctccaattctagattttattttgatataaatacaggatatcgttagtataacctattttggctcaaaaggttgcctttcgtcaatttgactaaaaaagcgacaatttttgctgcggccttttttaatggagaaaggactaaagtcttgctaagtgtgcttgcaaaaagtcctgccgttcctcaatttctctaagtatgttggtctgctccttttcgatttgaaaggggctttttttgataaaaggatcatcagcagcactttgacaaatgtcaaggtgccattcgttgatgagaggagataatcgttcaatagtaaacgaccgcttcagcacgtttttcattaaggtgtgatattgcgacctgaaggcgggaatggatagaagccttgacgaaagcgtctttccttttgtcagaagcgggtcttcttcataccattcttgtacggcaagcgatcttgtctccatcggggaaacgtaaagccgaccggattcgtttaaacaaaatgtgtagtaaaagccttgattggtgcaggcgttgccgatcagccacaaaaaaaacagcttgacatccagatacaatttaatcctttcagccaattcgtcatctccggctgtgcggatcagtatgaaaaattcatgtaagaatgccgagaaatcattgttaaaaagggacaatggaacccttggatcggccgtcttcactccgtaactccttttaccggctggctgatggttcttgatgttcaaataaatgccttcaggctggccattgatggtcagaaagctgtacgaggcaacgggagcaggtacgccgatctggtcaaaaaaacaataggcgagtctgcgccgcatcagggacggatcatcctgttctgcattcaaaaaaagtgtcctttcaccaagcagagacttttcccagctgatttcataggatgccttttccgctctgtcacgctgtgtgagaagaatgggagaaacagatcgatctgttacgaaaagccccttggctgtacctttccttttcagctgctcccgatgaaaaaataaatgcacgcgctccatattctttcctccttctcaaaacgacatttgtatgatatgtagagcaagcccgtcctgaaacgaaatgaaaacggaaaggagaaaaagggatttcagcattcgacagagaatacatgaaggagcattctgatttaaaagatgatggaggaataacatgaaatttgcgacaggggaactttacaaccgaatgtttgtcggcctgatcattgacgatgagaaaattatggatttgcaaaaggctgaaaaaaaactgtttgaacttgagacgattccgggatcgctgattgaatgtatcgcagaaggggataaattcgttgcgcatgcaaggcagctggccgagtgggcaaagaaaccgaatgatgagctgggatcatttatgtattcattatctgaggtgaagctccatgcacccattccgaagccatcaaaaaatatcatctgcatcggcaaaaactaccgggatcacgcgattgaaatggggagcgaggctgatattccggagcatccgatggtatttacaaaatcgccggtaacggttacggggcatggtgatatcgtaaagagccatgaagaggttacctcccagcttgattatgagggagaacttgctgtcgtgatcggaaaaagcgggacccgcatttcaaaagaagatgcatatgaccatgttttcggatatacgattgtgaatgatatcacggcgcgtgatctgcaaaaaaggcataagcagttttttatcggaaaaagcttggatacgacatgtccgatggggcccgtgcttgtacataaatcatctattcaggagccagagcgcctcaaggttgaaacaagagtcaacggcgagctgcgtcaatccggttcggcaagcgatatgatcttttccattccggaattaattgaaaccctctcaaaggggatgacgcttgaagcgggcgacattattgccaccggtacgccatctggtgtcggcaaggggtttactcctccaaaattcttgcggtcaggtgacaaaattgatattacaattgatccgatcggaacgctgtcaaaccaaattggctgaataaaactggagggcggacccggacccgcccgttttttctgataatcatctttgtggcagaggacaagttcatggtactataagtggggtaatttatctgatagggggaacatatatgacacacctacatattacgacatgggtggtagcgctgattctgcttttcgtcagctactcgctgtattcgtcaggaagtgcaaagggcgcaaaaatcactcatatgattctgcggttattctatatccttattattttgacaggagctgagctgtttgtccgtttcgccaactggaacggagaatacgccggcaaaatgattctgggcattatcaccatcggcctgatggaaatgctgctcatccgcaagaaaaaagaaaaatcaacaggaggcctgtgggtcggcttcgtcattgtccttttgctgacagtgctgctcggtctgcatttgccaattggttttcaattgttttaatagaaaaacctatgaacccggctctttgatagagttgggtttttttatatttatcccctcatattccaaatcatttaaaataaccttaaaattccctgtaagcggtatctcgtcctatgaaattatgataccttcaaggagattcattattttgcaggagggataacatgaaacgcagaaaattcagctcggttgtggcggcagtgcttatttttgcactgattttcagccttttttctccgggaaccaaagctgcagcggccggcgcgatcgatcaggcggctgctctggaaaacggcaaagagcagacaggcgccatgaaggagccggaacaggtgaaatggtacaaagtgaccccgggagcaacggatattcagaaaaactcacatatggcactgaccgtaaagagtgattcagtactgaatgtatctgtatatccaagtaaggaaaaagcgcttaaagatgagacgtttgagatgtaccgttctttcacagcggaggatggaaaaagcgaagtcatttttccatacgcgtggagcggcccttactatgtaaaagttgaatacctcggagaagaagagccagaggacggcggaacggcagaagcagctgcagaagccaagtatacgattgggtataaaggcaccaaaaaacagccgtcagatttagaagaggaagaagcttgtccggttgaaatgagtgtcgatcagaagaaatcaggaaaaggcatcctggataagctgagagcgattcgtgatgagcagctgagccaaacagcagaaggcaaagaactgacaagcctttattacaaagcagcaccgtttatcgttgcaaagctcgcactcaataaaacagcaagaaatgaaatctatcaggatcttgtgacattaaagccgttatttgacgatgtgtcagaaaacggagcatcatcttcgcataaggtcactgaaaaggatcaaaaagcaatcaaccggctatatgataaagctttacaatcagtcccgtcattccttaaagaggagataaagaaacaagcggaccgactaaatatgaagcagctgcaaggcaaaacagccggagccattttaacagaaaaccatattgcagcaaaaagtgaagttcagacaacaaaggttattttcaaggtgaaggacaataaaagcctctcatccgtacataatgaaatgaagggcttttctgcaagcgcgcaatcgaaaaaagacatatccaatgtgaaaaaggcaaagaaactgtttgacaatctgtattcatttgaacttccgaaagatgagaaacagaacggcgcatatacggcaagcgccaaaagggtcaaaagcgctgctgcgacactatccaagatgtccaatgtagagtttgcggaacccgtgcaggaatacaaaagcctggcaaacgacattcagtacccttatcaatggccgcttaaaaacaacggtgaaaacgggggtgtcaaaaatgcggatgtgaaatatgagcctgccaacacattgctgtccaaacgcaagcttaacgatacactcattgcagtagtagacacaggcgtagacagcacgcttgctgatttaaaaggaaaagtaagaacagatctcggacacaattttgtcggacggaataacaatgcaatggatgatcaggggcatgggacgcatgtcgcaggcattattgcggcccaaagcgataacggctattcaatgactggattgaatgccaaagcaaaaatcatcccggtaaaagtgcttgattccgcaggttccggagatactgaacaaattgctctcggcatcaaatatgctgctgacaaaggagcaaaggtgattaatttaagtttaggcggaggctacagccgcgtgcttgaatttgctttgaagtacgcagctgacaaaaatgtcttgattgccgcagccagcgggaatgatggagaaaatgccttatcttatccagcatcttctaaatatgtgatgtcagtcggcgcaacgaaccgcatggatatgaccgctgatttctctaactatggaaaaggtctggacatctctgctccagggtctgatatcccgagcttagtaccgaacggaaatgtcacgtacatgagcggaacgtctatggcgacgccgtatgctgccgctgctgcaggattgctgtttgctcaaaatcctaagctgaaaagaacagaagttgaggatatgttgaaaaagacggcagatgacatttcctttgaaagtgtcgatggcggagaagaagagttgtatgacgattatggcgatccgattgaaattccgaagacacctggtgtagactggcattcaggctacgggcggctgaatgtcatgaaggctgtcagcgcagctgatttacagcttaaggtcaacaagctggaaagcactcaaacagctgtcagaggaaacgcgaaggaaggcacacttatcgaggtgatgaacggcaaaaagaaactcggcagcgccaaagccggaaaagacaatgcgttcaaggtcaatatcgcgactcaaaaacaggatcaagtactgtatgtgaaagcaacaaaaggcgatgcgaaaacatcgtataaagttgtcgtcgtcaaaggaaaaccttccggcacaccgaaagtaaacgcggtgaaaacgaaggatacggcagtaaaagggaaggcaaacagcaaagcgatgatcagagtgaaaaacaaatcaaagaaagtcattgcttctgccaaagctgacgcaaaaggaacgttttcggtgaaaatcaaaaaacaaaaagccggaacggtgctgtacgtcacggctgcggatacagataaaaaagaaagcaaggaagcaaaagtggttgttgaaaagtaaccaaaaagcggtgctcgatgcaccgcttttttatttgcgcccccgttggactgctgaatacataatggatcgctttccgtttgaagccgtccattcaaaacggtctcctgtcccttcgctgctgtagtgatgctgcatcgcgcattgtgcggtgtcatttgaaaagtgataaaaggacacaccctgccccgccgaagtatccgaaaagactcctttattataagaaaagacgcaatcgaataccgataagccgaagctgtgcaagtgctgcagaaatgcgagaaaggtttcgtcgtcaagcgaatccaaaagcgccatgagaggccgcttgactgatttctcatagcggatgcgttctccgccggaaagggagatgttttctgcaccgcatgccaaaaccaacttgtcctgaaagccggcttgctcccactttcctttatgatggacccagattgggctgtgttggagactgtccgccagcagtatatcgccttcaccgttttcgattaagcagatgccgtcttcaatgaggatggtgccgtattcccactttcgttcctctgtatataacaattgtttccgtttcatccatgctgtctcctttttcttcattcctctcttttctttccaattcaagcctgtcccatacaactcttttatggacaaatcaactatctgcctatagatgcataaacttactaaggtgctgaaagaaacgaaattgttacgaaagaaacgggattggagctgatgtcacatgtgtggaattacgggttgggtcgattttaaaaagcagctcgtccaggaaaaacaaacgatggacagaatgacagacactctttccaaacgagggcctgatgattcaaacgtttggggggagcaccatgttttattcggacataaaagacttgcggttgttgatattgaaggcggacgccagccgatggcgtgtacctataaaggggatacgtacaccattatttacaatggcgagctttataacacggaagatttgcgcaaagaattgcgggcgcggggccatcaattcgagcgtacgtcagataccgaggtgcttctgcacagctacatcgagtggcaggaagactgtgtcgaccatctcaatggcatattcgctttcgctgtgtgggatgaaaagcgtaatctgctgtttgccgcgagagaccgtctcggcgtaaagccgtttttttacacgaaggaaggctcttcatttctcttcggttcggaaatcaaagcaatcctcgcgcaccctgatataaaagcgagagtggacagaacgggactttctgaaattttcggtcttggaccgtccagaaccccgggcactggcatatttaaaggcataaaagaaatccgcccggctcacgcgctgacattttccaaagacggacttaatatttggcgttattggaatgttgaaagcgaaaaacatacggacagttttgatgacacggttgccaatgtcagatcgttatttcaggacgcggtgacgcggcagcttgtgtcggatgtgccggtttgcacattcctatcaggcggtctggactcaagcgcaattacagcgattgcggcgggccattttgaaaaggaaggaaaagcaccgcttcatacttattcgattgattacgaagagaacgataaattttttcaagcaagcgcttttcagccgaatgatgacggaccatggattgaaaaaatgacagaggctttcggcacaacgcaccacaaatgcgtcatcagccaaaaagatctcgttgatcatttggaggaagctgtactggtcaaagacttgccgggaatggcggatgtcgactcatccctgctgtggttttgccgggaaatcaaaaaggactttgtcgtcagcctatcgggagagtgcgcggatgagattttcggcgggtacccgtggttccatacggcagatgttgagtctggctttccatggatgagatcaacggaggagcggatcaagctgctttctgactcatggcagaaaaaattgaatctgaaagaatacgtaaatgccaaatatgaagaaaccttggcagaaacgccattattagacggagaaacgggtgtggataaagcaagaagacagctgttctatttaaatatgctttggtttatgacgaaccttttggatcggaaggatcgcatgagcatgggggcgagcctggaagtgcgggtgccgttcgccgatcaccggcttgtggaatatgtttggaatattccgtgggaaatgaaaatgcatgataatcgggaaaaaggcattttacgcaaagcgcttgaaggtattttgcctgatgacattctgtatcgcaaaaaaagcccgtatccgaaaacacatcatccggaatatacaaaaggcgtcagcgaatggctgaaaacgatcagaagccaaaaggactccgtgctccataccttgctggacagaaaacaattagatcagcttttagaaacggaaggctcctctttcaaggtgccgtggttcgggcagctcatgaaggggcctcagctgatcgcccatcttgctcaaattcatacatggtttgaagcgtatcgcattgatattgacgagaggtaggttcaatgcaaatgtgattaaaagccagagatgtatagatttaaataagaaggatagatgagcagggaaatatatgctctatctatccttttttgtacaacagcactatcgaattgcccccgcattccttcaataagaatgaataggttttaatgttctgccgataaaactagctgataccgggcttaactttaattccctagcccatacagaaagttgaccaatatggtgaatttcgtgagcgatgatatggtgtaatatttcatctcgcgtatataaaacacttgtctcccaaggaacgcttacaagttcatcttttatttgatctgaatgtgtttgtaaaacatcaattatttcagttcggaatgtatttgagagagatttcactttattgagtgtttgataatcagcgaactgaacagcgatatcttcttttccttggatagcacgaatccaactatattccacatcaataatatgaaaaagggtatataaaatattctctactccgccaagacggtttttaagtaattcttcagtggttagttgatgacaccaagtaaaccattgatctctaacctgccagttatattcaaaaaattttatcactgaactcactccaatactatcatgtatcataacaattagcccttttttccgtgattcctctattattgaagtgatgattgagaaatgtttacattctacctgttgtatggcattaaaaataataatgcatatctcgtcgatgatgctgtgcgtcttgttacttttacaaagtaagaatcggcattttcttcatatacaattaggaaaaaacatactagacttgaagaagcagtgatacataggagtgagaaaatgaaagagataaaagaagcttaccagcaatgcggacagattgttggcgaatacgcgccagcctgtttcaaagcattatcatatctcccgctaaagcaaagacaagcctcttgggcagtattgtcgttttgccacacggcggccagtgcagacgaaaaggtattgcccgcatttgaagctaaagctgatcatgtttaccaaaggacaaataacggtaaacaacatctatggaaggcttttgatcatgcgtatcggacctttacattggaaagcgaaccttttcgggagtttattgccgcacaaaaagaagacgccaagccgtatgatgaccttgatgaactgctcatgtacgcatatcggacgggcggtgctgccggattgatgctgctgccgatactgacacgccgaaaacaagatcagctcaaacaagcagccgtctctctcggcttggccatacagctggttcgcttcttaagtgatcttggcacagatcagcaaaaaaaccgcattccccgtcaggtaatgcagcaattcggctatacagaggctgatctccaaaaaggcaccgtaaataaagcgttcacaatgacgtgggagtatatcgcttttgaagcagaagcctaccttgaagagtgtcaggatgccttgccgctatttccgcagtattctcaaaaaacggtgaaagccgctcttcatttgcaccgggctgttttagaaaaaatccgggcgaagcagcacgatgtatttcaatatcacttcgctctcacagagaccgaagtgaagcagattctgtctgatatctaaaaaacacccggccttgattgagccgggtgttacgccatacctttttgaatccagatacgtgagcgccatcttctgtacattaagattccccggacccattcatccgcgataaaagaaatccaaatgccggcaagaccgaaaccgaggtggatgccgaaaagataagcaagcgggaggccgatgccccacattgaaatcattgccatgtaaaccgggaatttcgcatcccccgcagcccgcagagagttaatgataatgacattaaacgagcggcctggttcaagaataatggtcatggcaatcaataggcttgcagttgctataatgtcagggctttgtgtgaagagtccgatcaggtcttttgaaaagatcgtcatcaaaacagaggtagccgcagcaattccgagtgcccaatataagctcttcatgcagcgctcataagcggcatcaaattgtttgccgccgatataacggccgattaagatttgtgtaccctggctgatcgcagtgccgaacagcaaaataaacatcgtaatattttgcgtatacacttttgttgtcaacgcctgcgcgcccatgatggcgataaaatacgtgacaatcatttgcgaaaggttgtatgaaagctgctctcccgcagaaggaatgccgattttcagcagcttgcgcaaatgctctttatgcatatgaaagacttttttcagcgacatcttcagctggatgcgtttgttgacaatcacaatcatcgcgattaatccgatgacgcgggcgatagatgtggacatggccacaccggtaacgccgagaacaggaaagccgaacaaaccgaaaatcacaacaaagtttccggcaatgtttaaaatgttcatgccgatagtgacaaacattgtatcttttgtgtagccgtagctttttaagatcgcgctgaatgtcatgattaaagcctgaataaaggacagacctccgacaacttgtaaaaagactttcgcatcaggcatcagtgcgtctgataatcccatcatatgaagcagagggacagccgcgaaaaagacgacggcgctgatggccaggctgatgaagaagttggcgccgattgacacataagcgacttccatggcttctttcttttgccgtgagcctagaaattgtgaaatgataacggtcgttcctgttgcgataaagctgaacatcacgataattaaatttaaaatctggttgctgacgccgactgctgccacgctgttatccgagtattggctgagcatcagtgtatcggcattacccataaacatatataatgagacctcaataaagatcggccaagtaagcgaaaataatgagaacgttttgtcagcgggttttttcaaagcagttgatttgaagacagcttgtttcatagtgtctaacccctttcgtaaataaaatcaacgttttaaagtgtacctccatttccttataataaaaagggatagaaacgatacttcttgtaaaaatccgacttaaaaaggaggatgattcaaatgccccgcatcctgtttacagtcccgccttttccggtatttattgcagctggggaaggggtttttaaaaaaggagaaacccatgtgaaacgtgtattctccgtgtttgatctgatatatgtcaaacagggaacgttatatataacggaaaatgaaacatcgttttctgttgaaggcggcgagtacatcttgctttctcccggtcttgaacactacgggacgaagggcagtgatgaagcaacctcctactattggcttcacttcgatgaacatcgatatgaatttacggcaaagggaggcagcaactggtctgagcttcagcaggaaaaagggagcttcgaagagccggcccgctacggattggctttgccgagaaaaggcaaggtgcagcgcccgcagtttatggcgcagcagtttgaaaagctgatcgattactccgcggaaaactctgatttgcccctcagaaagcaaatcttatttgaggagctgatgctgcatcttcaaaaagaagcgttccaaataccgtctgcgaaagagcgggtagcctgggaggcggcccggtacttacaggagcactataaggaaaagacgacaatcaaggatctgtcgctcgcccttcactatcatcaggattatgtgagccgctgcatgcagcaggtgctcggcgtaactccggcacaatacacgaaccgggtgagaatgacggaagcgaagcgtcttttatcctctacaaatgataaaatgggcgttattgcggaaacggtcggaatggaagatccgacatacttttcaaaactctttaagcagatagaaggcatttcaccaattgaataccggaaaattgtcagccggaaagttcaataaccagacgagggatgaacatgaaaacaacaatttacgatgtggcaaaggcggcgggtgtctcgatcacaactgtgtcccgtgtgataaacaatacggggagaatcagcgataaaacacggcagaaggtcatgaatgtcatgaatgaaatggcatacacgcccaatgttcacgccgcggcgttaacgggaaaacgaacgaatatgattgctctcgtggcgcctgatatttcaaatccgttttacggcgaactggccaaaagcattgaggaaagagcggatgagctcggttttcaaatgttgatttgcagcaccgattacgatccgaaaaaagaaacaaagtatttttctgtgctgaaacagaaaaaggtggatggcattatttttgcaacagggattgaaagccatgacagtatgtctgctttggaggaaatcgccagtgaacaaattccgattgccatgatttctcaggataagccgcttcttccgatggatattgttgtgatagatgacgttcgtggcggatatgaggctgccaagcatcttctgtcactcggccacacgaacatcgcctgcattattggagacgggtcaacgacaggcgaaaaaaatagaatcaaaggcttccgtcaggcgatggaggaagcgggcgtgcccattgatgaatcacttatcatccagacgcggttttccttggaaagcggcaaggaagaagcgggaaaattgctcgacagaaacgctccgactgctatttttgccttcaacgacgtattggcttgtgccgccatacaagctgcgagaataagaggcataaaagtgccggatgatctttctatcattggttttgataatacgatactcgcagaaatggcggctccgcccctgacaaccgtagcccagccgataaaagagatggggcggagcgtcatcgaactgctggcagaagcaatagagggaaaacgaaaggcgaaacaaaaaatagtgctcccgcctgagcttgtagtcagacattctacatcaccgctcaacacatgagcccgctaatgagcgggttttttcattatgacagttgaagccaaaaaaacatattgcgtgtaaaccaaaggcagtgtaaaatgaaaccatcttttgagaaagcgcttgcgcaaaatggcagagcggatagaaccgctgtttttttagctgttaagagaaagcgctttcccaaagcgagcccgaaatgagataaaggagaggatgggacgtggaacatcaagtaaggtgcgcagtattgggattaggaaggctcggttattatcatgcgaaaaatctcgtcaccagtgtgccgggggcaaagctggtttgtgtcggtgatccgttaaaagggagagcggagcaggttgccagagaactcggtatcgaaaaatggtcagaggacccgtatgaagtgttagaagataccggcattgacgctgtcattatcgtaacgccgacaagcacacatggtgatatgatcatcaaagctgccgagaacggcaaacagatctttgttgaaaaaccgctgacattaagccttgaggaatctagagcagtttctgaaaaagtgcaggagacaggtgtcatctgccaagtcggctttatgagacggttcgatccagcatacgcagatgccaaacggcggatcgacgctggagaaatcggcaaacctatctattataaaggctttacgcgcgaccaaggcgcgcctcccgcagaatttatcaaacacagcggtgggatttttatcgactgttccatccatgactatgatattgcccgttatttgctaggggcggaaattacttctgtttcaggacacggcaggattctgaacaatccgtttatggagcagtacggcgatgtggatcaggcgctgacgtatattgaatttgactccggcgcagcgggggacgtcgaggcaagcagaacctctccatatggacatgacattcgggcggaggtgatcgggacagagggcagtattttcatagggacattgagacatcaacatgtgaccatcctatcggctaaagggagcagttttgatatcattccagactttcaaactcgttttcatgaagcctactgcttggagcttcagcatttcgccgagtgtgtccggaatggaaaaacaccgattgtgacagatattgatgcgacgatcaatttagaagtgggtatcgccgcaaccaattcctttcgaatcggcaggccggtacagctagatgtgaagcacgcttatacaggtatgtaaaagctaaatatgttgcattttaggctttccgcaaaaaaaagcaaggacatttttagcccttgctttctcttttctcatataaatagtacatataatcagtaggtatgcctgaatggcccagctgtctcagcatggcggttacgttacctctatggtaagtcccgtgattgacgacatgcaggatggtgtctgcataggttgattccagtgtacctagtttcggatgctgcattgtgaaggtctgttctaagtccgtctggcggctgaagaaatcatgatactgtgactccagctcggcagcgtgctgtttaatcgctgccatattaccttgcgcggactctaatttgcctgcgctgtctataatctcttggtaggccactcccgaaagaacattcagccaaatgtagtcagccctgcacatatgaagcagcacgtcgctgacagaaggaaatacgctctttacttcttgataggcagtttcctccggcaggttttcgatatgggtaaatattttcttgtttgcccaagaatgatagtcataaaactgttttgcatcagtcatcagcatgcccccttttctaagaaattcgtttttttcatctgtttctccttcaattgcaaaagagtgacaccccaaaatatcctgccgctgcccacataaccgctgcagagcatttgtttacgatcagcataagcctgccgctcgtatctatcgtctgaaacaaccggcccgctattgcaaggctgataaaccaaatccaagacacagcgatgcaggcggccataaagagccatttctcaagccccgaatattgaagagagctcgtgccgatgacgccgatcgtgtccagaatggcatgcgggtttaaaagagaaacagcggccgcaaacgcagcttgcttttttggtgtgaacgtatgtttctcattttggcttgtgttcggacggctgttccaagtcacccagcccatataaagcaaaaataaaaatccgccggccatcatgactgtctcaaacacaggcagctcctgcacaatgacagacacgcccgcaacggctaatacgattaacagggtatcgcagactgaagcactgatgacagctgggagagcccgccaaatatgcttttgccacgcgccttgctgaaaaataaacacattctgcactcccagcggcaaaattaagccaaacgcgagcacaattccgtgaatgattgcattcatgctgaaaaagctcccttcacatttttttcaatcataagagagattgtcactaaagtctccagccatttggttgggttagaaaccagccaaatgtataatgtgtaaaaaaggggggcatgaccttgtcgcaatggcagccaagccgaaagtcggatgttccgctgcatcggcagatcgaacaatatatgaaagacaagattcttcacggagagtgggctgtagggacgaaaatcccctcacagagaacgctggccggcatgtttcaagtcaaccgcagcacagtcacagcagccatagatgaactcacgtctcaaggcttgttagagggaagaagaggcggcggtacgaaggttgtaaacagtacttggagcgtgctggcggctgagcctccgcttgattggagcgattacgtccgttcgggcattcatcgcgccaattcttccatcattcaagctattaatcagaacgaaccaagagcggatatcatcagattaggaactggagaactttcaccggatcttgtgcctgctgacacaattggacggatgtttcagcaaatcaatccgggcgccctgtctttaggatatgagcagccgaaaggaaaccgtcagctgcgggaggcagtagccgaccatttaaaaggaaagaagatccatgtgtcaccgtctgcaattttaattgtgtccggtgcacttcaggcacttcagctcatctcaattggacttttaaaacgagattctgtcattttgacggagaagccgtcctaccttcaatccttgcatgtatttcaatcagctgggatgcggcttcgcggcttgccgatggatgatgaaggggtcaaagcggggcttgtttcttctaatcgaaaacaatatggaggacagctgctttacacgattccgtcgtttcataatccgacaggcacagtcatgtcagagcagcgaaggaaagagatcatcagcctgtcaaaaaaagagcagctgcccatcattgaggatgatgcgtacggtgatttatggtttgaagaaaaaccgccgcagccgttgaaagcaatggatcatgagggcaatattctgtatctgggcacgttttcaaaaacggttagccccggtctgcgaatcggctggcttgccggtccggagccggttattgaaaggctggcggacattaaaatgcagacagactacggatcaagcggcctgtcccagtgggcggctgccgagtggctgtcacaggggtattatgaagagcatctgacttgggtacgcaggaagcttaaagaaaggagagacgcagccgttcattttctcgagcggtatgccggggacattgccacgtggcggattcccgcaggcggcttttatatttgggtgacatttcacaaaaacctgcctgtcagccgtttcttttatggattgctgaaacggcaggtgcttgtgaatcccggctacatttatgacggtgaagaccgaaacagcatcaggctgtcatattcctatgcatctcttggagatttggaaactggcattaaagcggcagctgaaacagcacgctgcctgatgatgtcctaagctttggttatacgatgacagctcccagtgccctggcgaaggcaatcgcgtgctcaggtgcgattttgcagcctttcaatttgtcgagggagacatgaagctgttcaaaacggcacgtgctgatgtccatgttttgaagggatgtgccggtaaagctggcgccttccaattcgcatccgtcaaagtgtgtctgctggagcaccgtattgctgcattcactttgcataagagcacagtgatcaaatcgaacttgtttcatatttgagtacgaaaatgagctgaaatgtccgtggcattcctcgaatgaaacatttcgcagcgttgcttccgccacattcattccaaccatttttgactgcttaacagaagttctgtgaatgacagccccgctgaaatcggcgtttgataaatcacatttttcaaagatcacatcggtcagttcaatatgccgaaaagacacatcgataaagacgacatttctgaataccgttttttcaacacagagtctttcgatatcttcgccgcagattgtacaatcttcaaacaaatgcatgctgattacatcatcctgcgtcacggcatcatgaaaatctgcggtttgcaggttttccggtatgttcggtttttgaattgcgattttattcatgtgatgacatcctttgctgcccgaaaaacagaggcttccgggttcaatttaatagatcgttaaggaaattgatacatatagtaaatcgtgaagagccttttcttggtacagcagccagcttgttttgtaagcataaatggaaagcttcctatacgtcaaggcgtttacaggccgggaaagccaaagggaacaggaggaatgcggaatggggcattacatcaaaaccgaggagcatgtgacactgtttgtagaggatatcggacatggaaggccgatcatctttttgcacgggtggccgttgaatcataagatgtttgaatatcaaatgaatgagcttccgaaaaggggatttcgttttatcggcgttgatttacggggatatgggcaatctgaccgcccttgggaaggctacgattatgacacgatggccgatgatgtgaaagcagtcatttatacgctgcagcttgagaatgcgattcttgccggtttttcaatgggcggcgccattgcaatccgttatatggcaaggcatgaaggagccgatgttgataagctgattttactgtctgcggcggcccccgcgtttacaaaacgcccgggttatccgtacgggatgaggaagcaggatattgacgatatgattgaattgttcaaagctgatcggcccaaaacactggctgatttagggaaacagttttttgagaaaaaagtgtctccagagcttagacagtggtttctcaatctgatgctggaggcctcctcctacgggacgatccactcgggcatcgcattaagagacgaagatctcagaaaggaacttgctgcaatcaaggtgccgacgctgatcctgcacgggagaaaggatagaattgcgccgtttgattttgcgaaagaattgaagcgcggcatcaaacagtcggaattggttccgtttgcaaacagcgggcacggagcattttatgaggaaaaagagaagatcaacagtttgattgcgcagttctccaactcataagaaaaaacccgacattgatcgggttttttatataattcctctgttttgcagtgcgttaatgatgagatcagctccatcggaaatagaggtctggtctgactcaatgatgaaatcgggtgaaagcggcgcttcatacggagaatcgatcccggtgaaatgtttgatctctccgtttcgcgcttttttataaagcccttttggatcgcgctgttcacaaacatgcagcgggcacttcacataaatttcgaagaactcacctttaggaaagagcgctctaaccatgtcccgatcctctctgaatggagaaataaaagccgttaaaatcatttgcccgctgtcgacaaacagcttcgccacttctccgatccggcggatgttttcaatcctgtcaccagtctgaaatccaagatctttgtttaagccgtggcggatattatcaccgtcaagcacgtagctctgaatgcccttgcggtaaagcttttcatcgacagcattggccagcaccgattttccggagccggacaaacctgtaaaccaaaggacgcagcttttgtgtccgtttaaggactgtctgtcagactttgagatggcagcgggatgccaaatgatgttcggattgtgtgtcattgcaattccccgctgttttgcttgatggcaacaggctgttggtgaagtcccttgatcagcacggctgcgacctcaggccggctgaattctttaggcggctttttgccttggcggagaagctctctcacttttgtgcctgataagtggatgtggtctctcgggctgtgcggacatgttttggaggtgcccatgtttccgcattttcggcaataaaagctgtgctcaaaaaacagcggcttgatgcccagctcttcctctgtgaatgattgaaaaatattttgggcgtcgtatgttccatagtagctgccgacacccgcgtgatcacggcctacaataaaatgggtgcagccgtaattttttcggacgagcgcatggaaaatcgcttcccgcggacctgcataacgcatggcggcagggaaaaccgataacatgacacgatcctttggataatagtgattaagcaaagcctggtagctctccattctgatatcgctggggatatcgtctgactttgtttctccgacaagcgggtgaagcagcagaccgtcgaccgtttctaacgctgttttttgaatgtattcatgcgctctgtgaacagggttcctggtttgaaagccgacaatcgtcttccagccgagttttttaaaggcggctcttgtttcagcgggcgttgcataaaactgttcgaaagatttgtcaggcaggcggctgaccgtgataggccctccgatatagtaatccgggcgcgccagcaatttttttacgcctgggtgggcaggatcgtttgttttaaaaacagacagtgcttcttgtgttttatcaggctggtatatatcggtgactgtgatcatgccgtaggtaacaccgtctttcacaagcttgacgtgatctccggcagacagctgttttgctgttttttctccgacaggcagcgtaatcggcaggctccacggcaagccgtttgccagcctcatttctttcacaacacgatgataatctttttccccaaaaaaacctgttaacgggctgtatccgccgatcgcgataagctccagatcactcagtgcaagctgatccagctctgcttggcacgcgcacccttcaaaatggcatgcgggatcacagcggttgattaatacccctccatggggttcgtttccattcaacgtgttcaacctccatttatacgtttccttgttttcttttctgcagttaatgaaagtttgacatcagcgtctcaacatcatttcgattctcacatcaagaacctgccatccgctattcctgatgcaggccgcattctgttttctcccgtccggcccatcttccagccctctcatcgttcgggtccggggaaggcagtgtacacatttcacagcctatgctcggataatgttgatcgtgcagtttgttataaggcaaattgtgcaggcggatgtacgtccaaacgtcatcccatgtccagtggataagcgggcaaattttgatgagctcaaacttctggtccaggtttacgtattgaatatgctttctcgttggtgactgatcccggcgcagtcctgaaatccaagctgtcatgccggacaggtgctttttgagcggttcgattttccgcaattggcagcagaggttcgggttatgcttccacagctctccgccgtacttcgtcccctgttctgttaagctcagctcgggttcgagcatctggattgcaaatcccggatatcgctctttgacggtctcgatcagctcatatgtttcctgaaaatgaagcccggtatccaaaaagatgatgtgtgcatttttgttgatttttgatattaagtcgagaagcaccattccttctgcgccaaagctgcaggcatacacaatcttttctccgtacgttcggtaagcccatttcaacacatcgagctcatcgatcaattgatccgttatccgtttggacagcatgtcgttccatgtgtcatatgtgatggtttcgttcaatgttttccccccgtttgcatctgctttttttatctattgatcgagttataggcagactattcattttttgcataaaggttcaggttttaggtgccgcgcccgcctaaaatgaggtgcggaaccattaagagcccggctgaatatgctttttagcaaaatggttttatgcccaaggagaggtagtatgccgattgccatttatcaggggcatcatcattcgcttgccccggcggacattaacatcgtcattgatgtcatcagagcctttacggtcgcccattatgcgtttatcggcggggcgaaagagattttgttggtccggacagctgatgaagcctttgcgctgaaagacacctatccggattatgttttgacgggagaggaaaagggggtcggtatcagcggatttgatttagataattctccaaaacgtatggctgggcagaatatgacggataaaagcctgatccagaaaacaacaaacggcgtcacagcagcattgggggcgctgaacgcaaagcatctgttcgtaactggattttccaatgccaaaacaacggcacagcatgtgaaaaagctcgtcgcaaacgattgtgtcataaacatagtggcttcccatccatccggtgatgacgatatggcatgtgcggagtatatcaaaggcatcattgaagggacaaatgtggtaacggctgcggaggcgattgaaagaataaaaggctcttctgttgcggagaagttttttgactgccgccagccattgtttgattcggaagacatcgtttactgtacaaaagaactgacgggcgatttcgtgatgaaagtgaaacaagatggagaagttccaacgatagagagggtcataatatgaatgatttttcactagaattgccagtgagaacaaacaagccgagagaaaccgggcagtccattttaattgataacggctatcccttgcaatttttcaaagatgcgatagccggagcgtccgactatattgattttgtgaaattcggctggggcacctcattacttacgaaagatcttgaagaaaaaatcagcacactgaaagaacatgacattacatttttctttggcggcacactgtttgaaaagtacgtaagccagaaaaaagtgaatgaatttcatcggtactgcacctatttcggctgtgaatatattgagatttcaaacggtacgctcccgatgacaaataaagagaaagcggcttacattgccgatttttctgatgaatttcttgtgctcagtgaggtgggcagcaaggatgcggaattagcaagccggcaaagctctgaggaatggcttgaatatatcgttgaggatatggaagcgggcgcggaaaaagtgattacagaagccagagaaagcggaacgggagggatctgttccagcagcggcgatgtcaggtttcaaattgttgacgacatcatttcctcggatattgatatcaacaggctgatttttgaagcgcctaacaaaacgcttcagcaagggtttattcaaaaaatcgggccgaatgtgaatctggccaatattccatttcatgatgccatcgcgttggaaacgctgcgtttagggctaagatccgataccttttttctgtaaaatagcggctgcggggctctcgtcgtgaagagagcctctgcctattattttttatggcggtacataggcgtgagatagggaagtgaggtcaggcggatgttgtagatgaagtcgatgactcttgtcgatatcacctggcatatgagggcttgaatgacgatgccccagtcaataatagacgcggtgaccataaaaatgatgcaattcatgatgagcaggatcgttccaggattcccgccgcggtagatagaaatcatcagagcaagggctccgaatcctccgttcgaaattttatatttgtataaaagtccgattccgagtcccaataacactgcgccgcttgccagatcaagccacaggttagatgtgatatcaggaaaaactgcatcaaagatcaataccgagacagaggtgacggtgatagaagcgagggtgccggtgaatgttctcatctccagccattttaaagcggtaaaaagcattgatacattcacagcccacactgaaaatccgtgggggatttgaaacagataatgcaatagcaccgcaatacctgctgcaccgcctgtcggaatatcatgcggaaataaaaacaaggacatgccgagtccctgtagtacgccgcctacgacaatcataaacgtaagttttgctttcatcagcagttcagccattaagtcatttgctcctttatgaaaagacttgtccgctgttttcattttatgaggctgtccattatttatgtctcaaaataaagaaatggcccagcttaataggctgagccatcccacttgtagcgattgacgatctccatattgatctctgtgccaatgccttttcctttcgggatgtggaccattccttttgaaggctgcaggctgacgagatctgtaaaaggattctccatgacgtcccactcgatcggttcaatgtgatcgtacttcattttagaccatgggggcagacaggcttgtgcaaataaagcatagagccgtgaaagcgatccgtcatatgcatgggcggatgctctgacgccgaaataacgcgtgagctggaggcagtcccgaaactcatcaattccgttgacatgcatgacatcgggctgaatgatatccaaacagcgctgtgaaaggagaggcacatattgcgccgggcctttcatgttttctccgccggcaacaggaacagacaaacggcttcgaagcatagcgtaatcctgcggctgatcaaagggcaaaggctcctcaagccagccaatgttcgtccattcggagaaatagcgctcccatttaaaagccgcagcggtatcgtagctttggtttgcgtccagaatcatcgtaatggagctgcctgctgtatgctgcagcgcattgatgtgccggacatcctctttgaatgaagtcccgccaattttgactttgatttgctcaaaaccttttttcaactgggcttcaacattggagactgagcggctgatccattgcggggagtctgagtacgattgaaaagacgcgtacacaggaatctcctctctgtatcgcccgccccataattcgcaaaccgaacaatccgcagctttggctgcaatctctgtcagcgccatgcttacagcggaggccgcccgctggtgccatttttgaatcgtgcgcactaatgacaggcggctgccagcctgttttcctaaaagaaacgggatgatccgtttcgtaaaaccgacatggagagcagggagccaatcaacacattctccccagccgtctatcccgctttcggtgataatcctgatcagataacaagtccgatatcgtttaagcccgttggcgtctccgtatggcttgtttaatcggtgcaagagcggaaaggtttcaatgcgtacaatcttcaaaccgtgtgctacctttcctcagcgggctgcagccgattgccagccattttagggtcttctttctcttttgtttcttcattattttgcttcacatggattaacatcatcacaagaatgccgacaacgagagtcaatcccgcaatgcttaaaaacatgccgggtctggaccattgcatcaggcggccgaaaatcggagggccgattgctacccctaagaagcgtacagatccgtacagcgaggtgacaaatccccgtctttccttgccgacagccccggtaatgaaactgttcacacaaggaaggacaagacctgagccgatactgctcagcacgagaacactgataaagaggacaagattttcaatgaatgacagtgccgcgtaagatacggtcatgaacgccaatccgagtacgatcagttttttcattaacgattgcttttgcccgattttgcttcctgttgtataagacgtaacacacataaccaaaagcggaatcgctaaaatcaagccttttttcacgccgtcggtgtcgtatgttttttcaagaacatctgataggtaaaacaggatgccgaataaagtaaacaaacaggtcgcaccggctaaataagcggtaaacagccatctgccttcatgtttaaaaacacttaacagccctttcgcatattttccgataggtggcggttctttttcctttttcttctctttaataaaaatccaagtcagcacgattgaaatgatacaaaacacagggaaggcaaaaaacgcgccataccagacaagcagggcgataagcgagccgatgatcggtgaaagcactttccccatgccgtttgaagcttcaacaaggcccagcaccttgctctcctgggcgcctttaaacagatctcccgtcagtgccatggcaatggggcctgttccggctgccccgattccctgaagcgctcgtcctgccatgacccaaggaaaggcattgtcaaaaaaacctgccgcaaacccggctaacaaaccgccggcaccatacaaaattaagcagggaataatgatgattttccttgagaatcggtctgcgagataaccgacaatcggaatcgcaaatgctgcaatcaaggaaaatactgtgatcacgagactgacttgaaattgtgataaatgaagttcagatttcatttttggcaaaatcggaataagcatcgagtttcctagggttaatattaaagggattgaaccgattgctacaatcgtcattccgttattttgttttgatgattccatctcagagcacactccttttcttctgcttagaatgtccctgatggcttcgtttattcagcgatcagacagcaaaaaaccgaacagaagatacctgttcgggaaaaaagagggttaaccgagagcctgtgaaatcaaagcatataagtgtccattttgaataggcgcttttttctgatagaacaaaatcggaggttcatcatctttatgaaatcccatttctatcaggctgtcatgcagagacgtgtgttcactcggtatatcgattcgcatcggcccttgtttgccggccgccagccttgtaattatctgtgctgcaacatctgatgatggagcgatgatagggccgaatttcaaattggccggtgtctgtacagaaagtccgtagccaatgagctgtccgtcctgatttctggcgatgatacattcgcatgaagcagaaataagctgctgcaaaaggtttgatcgatctccgccaaaggcagccagatccgccgcggttaagtcgtgaaagtcttgttctctaaaggatgtcagttcagcatcaagcttttttgtataaggttgaaaactgtgacagctgtactttcgcactgaacctgccgtatgaaaacctgctttttcataaagcggcaaaccttcttttgtggcgcaaagcctgatggcggtgttttcatccgtttgggtaatacaggcgtttaccatacgccggccaagaccgagccgttgatattctttgtcaacgatcacgaggccgatagaagcaagccggccaaacaaaaacaagccgatgcaggaaataatatcaccgctgacattttgatagccgaaaaagcgtccttgctggacaagcagtgccagctcttgttcgccgtaatccggccacccggcttgcctgcaaagccgcaatagactagggatatgttcttcatgaagcttaatcagctcatcgattaccctcatacagatcacctgcttgtttcgagttttttatacatgatgatatgtgtgcctatgccgggaatctcaaacggttcgccgagttcttcccagccaagctttgaatagtagcctttcacatggcttctggcattgcaccagactgcctgaacgccgttctttgccagtttctcttccgcgtgtttgatcagcgtgctcccgcctttttgatcacgatatccttcaagcgttgccatgcctctcagccgatatgctggggattctgttattaatggctgattttgcggggaaaaagaagcgatgctgatcagctttccttcaaaaaacgcgccgagatgaaaggagccttttgcatgatcctcttcatatttgcattgttcaatggattgatggggacgcagaatgcggtgccgaatttcatatgtatcttccgcggaaatggttttgacttcgagcataatgttcctcctcatgactgtttttctatatcgtaacacgaatcccgttgaaaaagaccgcccgattggatcagacagtcttttaagggattaatgcaaaaagatattttggcgctgctcatctttttgctgaatatatgaagtgagctcagcggttaagtcagatctgaggaaaggcgttatcaagtagatgccgttaaacagctcgcatgccgtatccagcagggagcgtgcaattgcaaggccttccgccttttgcttttctttatcttcaccggcatgggccattttttcgcgaatcgtatcagacagcttaatgccgggaatttcattatggatgaattcggcattccggctgcttgtcagcggcatgatgccgatatagatcggcgtcttcagatgttttgtttcgttatggatatcgacaagctgctgctcggaatagacaggctgagaaacaaaataatctgcaccgcaatctatttttttctcaagccgttttaccgctttatccagatggcggacgttaggattaaatgcggcggcaactgagaaattcgttttcttgccgagcggttttccagacagagacagaccttcattgaattgtttgatcagcctgattaaatcaaaagatgttaaatcatatacagacgtcgcaccaggaaaatccccgattttagaagggtcacctgtaatagcaagcacgtcattcagccctaacgtatcaaggcccattaaatgtgactgtaagccgataatgttacggtcacggcacgtaatatggacaagggaacgcatatcgagctgctgcttgacaagggcaccgcaggcaacattgctgatccgcggggtcgccaaagaattgtcggcgagtgtcagggcatcgattcccgcttcttttaattcagcagcagcggacagaaatttgtcaaagctcagttttttcggcgggtccagttctacgataatagagcgttttttcgctgcgatctcatccaggccgggctcggttcgctcgtgatgaacagaaatgaattctttggcccgggttttgacttctttttccgtaatcggagccagtccgccaactgcttccgccatcgccctgatgtgattcggcgttgtgccgcagcagccgccgataatccgcgcaccttgcttacggaattctgacgcgctgttttgaaaatacgtgccgtctgtttcatagacgagccgtccctcttcaagcgaaggaagactgctgttcggataaacggataagaatacgtcatcaaaaattggcacttcgctaagcgcttcaatcatgtgataaggcccgagccggcagttaatgccgacgatatcagccccgagatccgcaatcgatcgcaatgcttcagaaagaggtgttccgtcctgcaatacgccttgctcgtgcatggagacattgagcattatcggaagatcagtctctttgcgcgcgattttcagcacttcacgggcttcttccaaatcataatatgtttctaacagcaagccatccggctcttcatgcagcagcagatacagctgctcgcggaagctgcgcttaatttcgtcaagactgtacgcgtttttattaaatgtgcgtatgccgcccatcgttccaagcacgtatgcatcgcctgctgaagcccgcgcgatctttacggcctcctgattcatttttttgatgtcatcctcaagcccgtgtctggataatttaatatagttggccccgtacgtattcgtttgaataatgttggctcccgcttcaacgtacgctttatgtatgcgctgaatttcctccggctttgaaatattgagctcctcaaaacacctgtcaatgccataggagtagaggagcgtccccatggcgccgtcaccgattaacacctgtctttgcaaatcttctaaaagtcccattgtctgcctcctttattcacatcagcaaggaaaaaagagaaataaaaaaagtcctcttaagaagaagactttgtcagtgattttgtctcttcttatcttccaagctgttcgagcttgctggatttagcaccttggtcatggctgatcgccattacaccggttgctgaagcttcgtcgggccagtccctctgcttctcttgataagaacggatatgaaattttcgtgtcaggaagtgccaaaagatatctggcgtttttccctttctccaaatttaccgaaaataaagacaataatcaataggaatcagaaaatttatctgaaatttataaattgaacgtcaattggcagatctgctccccgtacagctgagataatctgctgcaggtcatctttgttttttccggtgacacgcacttgatcatcctgcacctgagactttactttcagtccggagtttttgatgatcgtattgattttttttgcgttgtccttgtcaatgccttgaacaagctttgcacgctggcgcaccgttccgcctgacgcgttttcaaccttgccgtaatcaatgttttttgtcggtacgtttcgtttaatcaatttgctgaccagcacatctttcagctggcttaatttgaattcgtcatcggaaacgaggaccagctcctctttatctaaagaaatgtcgcttttgctgcctttaaagtcatatcgggtactgatttccttcagtgcgatttggattgcgttttgcacttcaggcaattccaccttggatacaatatcaaatgaactttcttttgccatatgaaaacctccataacatttaacttatgtgttgattatagtagaataaagagaaacttccaacagaacaaagaatcaatttgtgatgattggaaaaaatgttaacaaaatccgcagagaataagcggaacaggaaggacgatagcatgagaccagggcagcaattaaccttgagtatagatcaccaaaccgacttcggttactttttaaccgatggggaagatacgattctcttacataacagtgaaatgactgaggatatcgaggacagagacgaagtagaagtctttatatacgtagaccagcaggaaaggcttgcggccacgatgaaaattccgatcatcagcgcggatgaatatggctgggttgaagtggtggataaagtggaagatatgggcgttttcgttgatgtcggtttatcgaaggacgcactagtcgcaactgagcatttgccgccgtacgaagatgtctggccgcaaaaaggggacaaactttactgtatgctgaaggtgacgaaccgggggcgcatgtttgcgaaaccagcgccggaagatatcatcagcgaactgtttaccgacgcttcagaagatctgatgaataaagagctgacaggtacggtgtacaggctgatcgcatcgggttcattcgtgatcacggatgacggtatccgctgttttattcacccgtcagaaagaaaagaggagccaagactgggttcaagagtcacaggccgggtgattcaagtgaaagaagacggttcagtcaacttgtcgctgcttccgagaaaacaggatgcaatgtcagttgatgctgagtgcattctaacgtatatgagaatgagaaacggtgccatgccgtacagtgacaaaagccagcctgacgatatcagagaacgttttaatatgagcaaagccgcctttaaacgcgcgctgggccatttgatgaaaaacggaaaagtgtatcaggaaaatggatggacatacgagaaaaaatagcatgaaaacggctcgcctgcagcagactgcggagcgagccgtttttttatgtctagtttaattcatcaaccagcgttctgattgccatttcgcgatccacattgtctgaaatcgcaatcggcgtaatatcaatggcgagaatgatcagaatcagggcacctgctgcagcaacataagaaacataatagaaatagttagcggtatcaacagtgttgacaagctcggcctgaactctggatgtatcatccttagaagcggcgatttcctttgcagcttctactttttcttcaacgatttgacctgcttttttcagcagttcatccactttcaatgcatctttgctgtaaacagctttcttcaggttatcaaaaaagtcagcatcctcttttttaatatcagcgacaacctgattggcaaaagcctttgcctgttttgtgttgagtttgtctgtcatcgctttattaaagacctctggaagctgtttgccaacttccccttgggcaaacacaaagcctttaaaaatttcctcacctgaatactcaagctgctttgcctgtgccacactttcttgctgcttcaccaaaaacacagtcgtcaccaatacaaccgacaaaaatactagaaacgccttcttcaaactgaaacctctcccttcttgtgttttttattccacaacagtctgcgaatatatgtaaattgaatcgtggaatcgataggagtgagatacaatatcaaaatgccggccatgataatcgaaaaactgatgaggcccagcatgactgcaaaaatctcatgcataaaaacagcgatgatcaaaatcaatctccaatgcttcttcggcgcaaacagtgccgcgaagatgacaatttgaaccagcagcgtcccccatgtcggaatcaccacgaacggacttgttacaattggcttcgttaacgcctgaaaaaagccgttgaagccaatggttttttcctgggcgaaataatagacggccgttccgtccacccattcctgctgagatagcttagcgacggtagagtgaaaataaagcaccgccacttggattctgatcacaaaataagaaataaaagctgttatttttccaagtgttcttttgccctctataggtctcgtactccaatgccattttctcggatcggtcagcgtgatgggaagcaataaaaaggtcatgactgctgctgcctgctcgcctccgtcgatgacgatcagcgatgactgcaggctgtaactgacataccaatgcagaaccccggtgattctggggcgccagccaatgacaacaagcaccagaatggcaatgcagacccatctgaaaagatttaacatcatatagttattttcgccgagacaaaagagactgagattcattttacaagctggatagctgctgatcccgctggctggcttcataatgaggctcgggtgattgatgagcagcgtcagcaggctggatagcgcaatgatgcttcgcgcgaggccatatacatttgtccacgggtttctttcgtcccatctggtgatggtctgttttatgttttcgagcatgagatcacaaccttgactatgctttttacctgataagacgaaggggtatatttagaatagctccaaggaacaatatcctctttcgtcaaatagtagctgccacaaagcagcgggcggggagcgggtgtttttaattgcacggttttggctttgcttttgcatgcgccgaggtccttttctttacatgctgtccactgttccttgccgacttggctgtagatcacgcccatttcaacgccttgtgaccgcccataccgatacaggccgaataggttgtcagccctcatattgggccatctgaccttggcgctggcattttcagcctcatataagccgattgcagtatcacgcggatttttgctaaaaaagccccagccctgagggaggatgctggacatgagaaatttggagtcctttgtcagcggaatcggggttgtccctaagctgccaataatagaaaacagaaatagcgaaccccaaaggattgaaaaaatgacaaaaaatgatatcgatttctgcattcgactgctccttttaacctgaagaatcgtttttacacttttcataatataaaaacatttatgtaataaaaaggttaaaaagtatgagaaattccatttttgttaaaaggaaaaacaggacattttacactgctatatgtgattgatatatagtgtttttttcgatatatttaaaccatgaaaacgaatcaagttaatgaccgctggattgttcaatttcgaaaagggattttcgagctggccatcctatccctactgcattctaaaccgatgtacggttatgagctgacgtcatccttaaaaaccacctcggctctggctatttcagagggagcgatttatccgattctgaaacgtatgaccgagaagggatggatcgaatttttttgggaagattcactggacggcccgaaaagaaagtattacaaaatgacacaaaaaggagaagaaatgttaaaagaacggctggagaaatacctggaaacccatcaagccttactgtctttatcgggggatttgctatgaatggacagcttatcattgaccgatacatggaggaactaaatgcagagctggagaatatgcctgatgtagagagagaaaacgctatcgacgaattaaaggggcatatcaccgctttcgttcaagacagaatcaaagccggccttagtgaagaggaactgcaggaagctgttgaatctgaattttctcatccgaaggagcttgccgaattgatgatgggtgatgggggagagacgaaaaggaggaggtctttattgggcaaaagctggctttcggtccttctcattgtcacgattatcgccctgccgctgctgccgtccgacttcagacatctgccgctggctgtttatttaatggtgctcgccggatatgtatggaagcggaaaaaattgatgatgtttgcaggtgtcagaaaaaacaaaatgcgctctcaaaaggagattgttacgatttcgcgagtcggtgcggtttatctgctgtttttagcagtggtgcttcttttgagcccgttcctcaatgcgcttgtcgtcctgctgctgattgcagtaagctgcgccgctttttttctttttcttaacatcaagtaatcttgtaggaggctgtaagatggaaatcagcatcaattatctattaattgtcatcgcgcttttattctttgtggttgcctattttgtcggaatcaaaaaacaaacctggatgctggctgggtttaacgaggcgcgtatacgggataaagaccggctggccagaatagcaggctactttttcttgaattccggtttgttcattttgctgaatagttttatctcatttcaaggtcaggagcagctcatacctccgcttatactggcatatggagcaggggttattatttatgtcaataaaaaattagtagagtagaaaaagaagggcagagcgaaatatctctgcccttcttttttgggaaaataagaacgaagcaccacatacaagtttttgtatttttgataggatgaagaaaaatggtagattccaaaataggaaggatgtggtgttttgcgcaacctgaccaagacatctctattactggccggcttatgcacggcggcccaaatggtttttgtaacacatgcctcagctgatcaaagcatcaaatacgaccatacgtatcaaaccccttcatacatcatcgaaaagtcaccgcagaagccggtacaaaacacaacccagaaagaatcgctattttcctatcttgacaagcatcaaacgcagtttaagctcaaagggaatgcgaacagccattttcgtgtttcgaaaaccataaaggatccaaagacaaaacaaacgttttttaaattaacggaggtttacaaaggaattccgatttacggctttgaacaagcggtcgcgatgaaggaaaacaaacaagtgaaaagtttctttggaaaggtgcatccgcaaatcaaggacgtctccatcacaccgtctatttctgagaaaaaagcaatacatgcagcaaggcgtgagctcgaggcttccattggaaaaatcgaatatcttgatggggaaccaaaaggcgaattatatatctatccacacgacggtgaatatgatctcgcctaccttgtgagactctcgacatctgaacctgagcctggctattggcattatttcatcgatgccaaaaacggaaaggtcattgagtcctttaatgccattcatgaaacggcaggtacaggaatcggcgtatcaggtgatgaaaaaagctttgacgtcagagaacaaaatgggcgcttttatttggctgacgaaacaaggggaaaagggatcaatacatttgacgcgaagaacctgaacgaaaccttgtttacgcttttgtctcaactgatcgggtatacgggcaaagaaatagtcagcagcacgtccgtatttaatgaacctgcggctgtagacgcacacgcaaatgcgcaagccgtttacgattattacagcaagacatttggccgtgattcttttgatcaaaacggagcaaggattacgtctaccgtgcatgtcggcaaacaatggaacaatgctgcgtggaacggtgtccagatggtatacggggatggagacggttcgaaatttaagccgctgtctggatcgctcgacattgtcgcgcatgaaatcacacacgcagtcacacagtattccgccggtcttttatatcaaggagaacccggtgcattaaatgagtccatttctgacattatgggcgcgatggctgaccgtgatgattgggagatcggcgaagatgtctatactcctggtattgcaggagattcattgcggtcattggaggacccatctaagcagggaaatccagatcattactcgaaccgctacacaggaacagaggattatggcggagtccatatcaattcgtccattcacaataaagcagcttatcttcttgcagaaggaggcgtgcaccacggtgtacaggttgaagggattgggcgtgaagcaagtgaacaaatttactatcgggctttaacatattatgtaacggcatctacagatttcagcatgatgaagcaagcggcgattgaagctgccaatgatttatacggtgaaggctcgaagcaatcagcttcagtcgaaaaggcgtatgaggctgtcggcattctatgagcaaacaaaaacagtcaggacacagagtctgactgtttttgtttgctcattttcttaaaaagaatatcgccaatgtacctggaccggcatgcgagccgattgctgaactgattggatgcataatgatttctttcggcttgaacgcttcctcaatcaggtgtttcatgtccgtggctttttctttgttcgcggcgtagctgatcccgacggtttgatcgctccaatcatccccgcgctctttcataagctcgatgatccgtttgaaaagtttcttctgtccgcggattttttccagaggcacaagcttgccgtcctccatctgaagcagcggtttaatattcaacaggccgccgacaaaagcggacgttttggatatccggccgcccctcgcgagatatgttaaatcatcaacggtaaaaatgtgttcaagctggctgcaaaagttctttacagacgtttcaatttcttgtattgtattcccgttgatacagagatcggcagcatgccggacagccagaccgtatcctaatgaagcgcatttggaatcaatgacccgcaaatcgaaatcggggaattcctccttcacttcattggcgatcattacagctgtctgatacgtgccggagagacctgaggaaaaggcaatgtaaagagcgggatcacctgtttcggcatattgcaaaaacacatttttaatcgtttgcggtgaggcttgggacgtcttaggcgtttctccattttgcatcgcttcaaatatttgatccgcatgaattgtgactgcatcttcgaattctttatcgccgagagaaaccctgagcggaataaagccaatgcctttttcttcaaaataagaacgaggcaaatcagtggcgctgtcagcgatgagatgaactgtcatattgcttcccttctttccgttatcgctcgttatcatgagagttaagccaactatatcatattaatttgccaaaatcgtgttcaaatatttgttttaagggaaaacataataaagaagaaagagcggaggaacatgccatggtactagatcaaacaaaaaaattactcatcgtcatcatcggcgctttactcaatgctgccgggctgaacttatttttgattccagcagatgtatatgccagcggatttacaggtgttgcccagcttttatcaagcgtcgttgatcaatatgcccccttttacatatcgacgggaacgctcttgttcctcttaaacattccggtcggtattttaggatggctgaaggtcggcaaatcgtttacagtgtacagcattttaagtgtcgcactcactactctgtttatggggatcctgccggaaacaagcctgtcacatgacattttgctgaacgcggtgttcggcggcgtcatttccgcagtcggtatcggcttaacattaaaatacggagcttcgacaggcgggcttgatatcgtcgccatggtgcttgcaaagtggaaggataaacccgtcggcacgtatttcttcattctgaacgggattatcatcttgacggcaggattattgcaaggttgggagaaagcattatataccctggttacactatatgtgacaacgagggtgatcgacgccattcacacccgccacatgaagcttacggcaatgattgtgacgaaaaaagcggacgaaatcaaggaagccatttacggaaaaatggtgcgcggcatcacaactgttccggcaaaaggagcttttacgaacgaacagaaagaaatgatgattatcgtcatcacgaggtatgaactgtacgatttagaaaagatcgtcaaagaagttgatccgaaagcatttacgaacatcgttcaaacgacagggatttttggtttctttagaaaagactgacgaaagcaggtggaagtcgtgaaacggctgcttgtgatgctcctccccgtgctgcttttgataggctgcgggaaagatgagcagacagaacccgataaggaggtatcaggcggaatggagaatcaagaggttgttttatctattgacgcaattcaggagcctgaacaaatcaagtttaacatgtcgctgaagaaccaaagcgaacgtgctattgagtttcaattcagcacagggcaaaaatttgaacttgtcgtgtatgattctgagcacaaagaaagataccgttattcgaaagacaaaatgtttacgcaggcttttcaaaacctgacgcttgaatctggagaaacatatgatttctctgatgtgtggaaggaagtcccggagcccggaacctatgaggtaaaggtgacatttaagggcagggcggaaaatctcaagcaggttcaggctgttcagcagtttgaagtcaaataagaggctatggcgagtcgccatagcctttttttattggagtttgtccagctgattttgaaattgatgcagctgttgacgttccgcatctgtcgaattggcatacgcagaagatacagcatttttggctctcagaatcgcttgctcctgatcgccttcctcaaagccgtttgtcaccatgaccgcctgttgaacaaatgattttgcctgctgaaacagttcatttctcatttaatattcaacctggctttcggccgagtctcgtgccgcggcatgctggtgagcttcttctaaagtagaccgatatggaaatcttgcggcgtgtagcccgatggagtctttaccctgctgaataaaccttctggatttgcttcgtttacccattttgagactgcccccttccatactttgacgagatgagtcgtcttcaatagtatggtggggcaaagtaaggtttatgagtgggaaaaattaatacggaccttctttaaagtgagaaatattctttcaaaaatcttgcaacgccgtcctcttcatttgtagccgttgttcggttggcaatctgcttgaccgcgtcaattccatttcccattgcaacgccgcagcctgcaaattcaagcatttccaaatcgttatcctcatccccgaaagcaatgatccgctccctcggcacgccgtaataatcgctgattttctgcaggccgaccgctttattcatgccgcttttgataatttcaatgacatgccacggtgcggcccatcttctatggtcgattacctcggcatgcacatccgataaatatgagcgtattgccggcacatcttcttcttttgcatgtatgagtacagacgtcacatcttcaccaagattttcccgcaagtctccgaccgttacatttgttgtgttcatgttaaaggcatctatcaggtgctcatcatggtaatgaaagtatacgtcgtcaatcacttcagcaagcacgttatgtacgttgtagctctcgctgatatccacgagctgtttgacaacatcaagcggcagtgacgtatgataccgtccccagctgtcgtcttgcggatgatggacaaatgctccgttaaaattgacaattggcgttgtcagctccatctgctggtagtacatggaacttgaacgatacggacggcctgttgagatgcagacataatgcccgtcatcttttaggcgctgtatcgtatgaagggtgttttcagatatggttttatcatcctttaataatgttccatctaaatctaatgcgattaaatagggttttgtctccatgaaaagctcctttaaccttagattttgcttgttttgccttacttacagtgtagctttttaccatctttattgtctacatgttacacttatgattatggttatcctaaggaggggcacattgtgatacaaattgagaatcaaaccgtttccggtattccgtttttacatattgtaaaggaagagaacaggcaccgcgctgttcctctcgtgatctttatacatggttttacaagcgcgaaggaacacaaccttcatattgcttatctgcttgcggagaagggttttagagccgttctgccggaggctttgcaccatggggaacggggagaagaaatggctgtcgaagagctggcggggcatttttgggatatcgtccttaacgagattgaagagatcggcgtacttaaaaaccattttgaaaaagagggcctgatagacggcggccgcatcggtctcgcaggcacgtcaatgggcggcatcacaacgcttggcgctttgaccgcatatgattggataaaagccggcgtcagcctgatgggaagcccgaattacgtggaactgtttcagcagcagattgaccatattcaatctcagggcattgaaatcgatgtgccggaagagaaggtacagcagctgatgaaacgtctcgaattgcgggatctcagccttcagccggagaaactgcaacagcgcccgcttttattttggcacggcgcaaaagataaagttgtgccttacgcgccgacccggaaattttatgacacgattaaatcccattacagcgagcagccggaacgcctgcaatttatcggagatgaaaacgctgaccataaagtcccgcgggcagctgtgttaaaaacgattgaatggtttgaaacgtacttataaagcacgaagttattaacaagagctgaatttacgttatactgtagaaaaaaggagtgagggaacgtggaagaagcattaaaagaaaacatcatgggcgccctggaacaggttgtcgatcctgagcttggcgttgatatcgtgaaccttggtttggtatacgatgttgacatggatgaagacggcttaacgcacgtgacgatgacactgacatcaatgggatgccctttagcgccgattatcgtggatgaggtgaaaaaagcattagcggaccttcctgaagtgaaagacacagaggttcacattgtatggaatccgccttggactagggataaaatgtccagatacgcaaaaattgcgcttggcattcaataaaacaaaagaggacagcctgacatgtgaggctgtccttttttacagctgaaaggagtgaaaggaaatgatgtacctgctggcagttttatgcccgccgcttgctgttttgttttcgggaaaaccgtttcaggccttgctgaatctcatattgacctgtatcttttggctgccgggcgcgattcacgcctgctttatcgtcgccgaccgccgtgccgaaaaacgggcaagaagataatttgggaaaatgaggatgcagtcatggtataatggtcataaaaacagcagggagagcactatgaaaaagaaattgcttgcattcgcgctttgtactggcgcgtatgcggccctgtttgcgtactctgtgcactcagagcaaaaaacagacacaagcgagatgacggatgtcagccgcctgatgcctgtaaaaataaagcagacagtgaaagggcaggaagaggaaacgctcattgacacagtcaaagaggcaaatcgaaaaaacataaaaatttcaatcgccggggcccagcactccatgggcggccatacatattatgaggacggcatcgttctcgacatgacgggctacaacaaaatcctgtcactcgatcaagagaagaaaaccatcagggtgcaaagcggtgcaacgtggaatgatatccagaaatacgtgaatccatacggactcgcggtaaaagtcatgcagtcacaaaacatttttacaatcggcggatctctcagcgcaaatgcacacggacgtgatattcgctacggctcgctgattgatacagtcaaatcattccggcttttaaaagctgacgggacgattatcactgtcactccaaaagatgatttgtttacggcggtcatcggagggtacggcctttttggcgtgattcttgatgtaacgcttgagctgacagatgatgagctgtatgtcatgaagacagaaaaaatgaattacagcacatactcagactatttttcaaagcatgtaaaaggaaatccagatgtccgaatgcatctggcgcgaatttcaacagcgaaaaaaggatttctgaaagacatgtatgtcacaaattacgtattggctgatcatcaggatcagctgccatcatacagcgatctcaaagaagatgagtatacgggagccacaaagtttgcactcggtttgtcaagacagtatgaatggggcaggaattggctgtgggacacacagcaatcctatttcctgagccaaaacggcacagagatttcacgcaataacgtcatgcggtccgaatcaaagtttcttgagtatgaaaacaatgacaacacagatgttttgcaagaatactttgtgcccgtgaaggagtatgggtcctatattgatgacctgagacaaacgctgtcggacgaagatctgaacctgctgaacattacgatccgctacgtgcagaaaaatgaaaaggccgacctttcctatgcgaaggacgatatgttttcgctcgtgctattaataaacgagggcttttcaaaagaagaccaggcagataccgcccgaatcatcaggcgcatgacagacgttgccatcaagcacggcggcagctattatctgccttatatgacctaccagacaaaagcgcaaatgagacaggcatatccgaaaagtgaagcgttttttcagaaaaaacgaacctatgacccgaatgagcgctttatgaattacttttatcagaggtataaataatggggaaaaacaaattaaaatggctgacattatcacaaagcagcgtgtttttcgcaagcagcttaatctttccgttttatattctgtttgtgaaaaatatcggctcaagctacacacagttcggtttttcctacggattgttcgggttgagcggagcgctcatttacccgctcctcggacggctgtctgaaaggtttgacagccgttattttctgcttctgaactcgtgggggatggctgttctgcttttatatgtcccgcatatcggaagcgtcgttcaagtgtatatcgtccaagtgctgttagggctctttggagcgatgcaaaagcatggagaaaaagtgctgatcgctaattttacagacagcggagagcgtggaaagaagattgggaattaccatttttggacggctgtcttttcagcagcagcaattatgcttgggggctttctcgctgactttttcacagtgcaaatgattttttatgcaagctctattctatattttttgagtggattgatgatgatgaaaacaggctgacgcggtcagcctgtttttttatgcggctgaaaagcggtgctgcatcaacgtttttgtgctggagttgtgctgatttttttgagcggaatttccattgaacagaaaatttataaatgaataaaaatattaaatatacgattgaattaatttttattcatgttataatgttaaataatttcacaaagaccaagagggtgaacttgttttgaaaataggaattgtaggtgctacaggatatggaggcaccgaacttgtcaggattctctcgcatcatcctcatgcagaggaatgcatactttattcatctagcggagaagggaatgtctatagcgagggttatcctcatcttaccggcttagcggatcagaagctgaagccgattgatatgaatacgatcaaacacgaaatagatatcatgtttctcgctgcgccgcccggagtctcaagtgaattgactccaaagctggcagatgtgggaattccggttattgatctgtcaggtgatctgaggatacaagaaccggctgaatatgaaaaatggtataaacggacagcggcaccgaaggcggtgatacaagaggcggtatacggtctggcagaactgaatcaactgcaaattcaacaggcgaaactcattgccaatccaggctgttttccaacagctgttttgcttggcctcgcgccattggctcaaaagaaactgctcgatgaatctttcgttatcgttgacgcgaagacgggtgtttccggagcgggaagaaaagcatccatgggaacccatttttctgagctgaacgacaattttaaaatttacaaagtcaatgaacatcagcacacgccggaaattgagcaggcgctgaatgaatggcagccaggcctcgggcccattacattttcggctcacttggttccgatgacaaggggcatcatggcgacgatgtataccagattaacctgtgatctatcagcagatgacctgcatgatttatattcggaattttaccaagattcatattttgtgagagtgaggccaaaaggtcagtacccgcaaacgaaagaagtgtacggcagcaatttttgtgatatcgccgtgaccctcgatgagagaacgaacagagtcacgatcgtctcggtaatcgataatttaatgaagggtgccgccggtcaggcagtgcaaaactttaatttgatgaatggctggaatgaagaaactggactcactatcacgccaatttatccatagaacgggagagaatcgaaccatgattcagttaagtgaagatcaaattgtaaaagtaacaggggatgtatcctcgccaaaagggtttcaggcaaagggtgtgcattgcgggctgcgctactcgaaaaaagacctcggcgtcattatcagcgagacaccggctgtgagcgcagcagtttatacccaaagccactttcaggctgctccgatcaaagtgacactagacagcttaaagcacggaccgacactgaaagccgtcatcgtcaacagtgccattgccaatgcctgcacgggagaacaaggcctaaaggacgcatacacaatgcgggagagttttgcttcacagcttggcattgagccggagcttgtcgctgtttcatcaacgggtgtcatcggcgagcatttagacatggaaaaaatccacgcggggatcgagctgctgaaagaaacacctgcgggatcaggcgattttgaggaagcgattttaacaactgatacggtgatcaagcagacgtgctatgaactggcaatcggcggcaaaacagtcacgatcggcggagcggccaaaggctctgggatgatacacccgaacatggccacgatgctgggatttgtgacaactgacgcggcaatcgaagaaaaagcgctgcaaaaggcgcttcgggaaatcactgacgtttcatttaaccaaatcacagttgacggagaaacatccacgaacgacatggtattagttatggcgaatggctgcgccgaaaacgagtgcctgacagaagaccatccagactggccggtctttaaaaaagcgctcttgctcacttgtgaggatctagctaaagagattgccagagacggagaaggcgcgacaaaactaattgaagcccaagtacagggagcgaaaaacaatcttgatgcaaacgtcattgccaaaaagattgtcggctcaaatcttgtaaaaacggcagtatacggaacagatgccaactgggggcggatcatcggagccatcggacactccgcagcacaggtgacggcagaagaagtagaggtttatcttggcggccaatgcctgtttaagaataacgaacctcagccattctctgaatctatcgccaaggaataccttgaaggagatgaaatcaccattgtcatcaagatggctgaaggggacggaaacgggagagcgtggggctgtgacctgacctatgactatatcaaaattaacgcgagctatcgcacgtaataaaggggagcgaaatgaagaaaacaatcgtttttaaatgcggtggaagtgtcatccgtgagctgtcggaggaattttttcaaaatctgaaagagctgatggcgtcaggctggaagctggcgatcgtacatggcgggggaccggaaatcacgaatatgctgaaacggttaaatatcaagacagagttttcgggcggacagaggaaaacaacgaagccggtgctggaagtggcggaaatggttttatccggttctgtcaataaatttttcgttgctgagcttgccaaacacggactgcgagccgcaggcatttctggtaaggatggaggtcttttggaggctgattatctagatccggaaacatacggagaagtgggagaaatcaaaaaagtcgatgcgtccatggtgaacgcgctgatggaaaatggcatcatccccgttattgcgccgctgtctatgacaagcgactgcaaaacgctgaatgtaaatgctgatctggctgcttcagcagtcgccggagcgcttgaagccgataagctgatgttcgtcacggatgtcgatggaatcatgaaggaaaagcaacgtctggacgtcctgacccctaaggagattcagatgctgatcaagcaggaagtgatcaccggagggatgatcccgaaggtcaattcagccttgtcagctttatcagatcaggtgtctgaagtcatgatcgtaaacggaaaaggttcattcttcgcagaacaaacctttcaggggacaaaaatcgtcaaagcaaaggaggctgtttcatgagcagcttgtttcaaacctacggccgttgggatattgacatcaaaaaagcaaagggaacgtacgttgaggatcaaaacggcaaaatgtaccttgatttcattcaggggattgcggtatcaaatctaggacactgccatgaagcggtgacagaggcagtcaaaaaacagcttgacagcgtatggcacgtatccaacctgtttcaaaacagtctccaagagcaagcggcgcagaagctggcagcgcatagtgcaggagatcttgtctttttctgcaacagcggcgcggaggcgaatgaaggtgcgataaagcttgcccgaaaagcaactggaaaaacaaaaatcatcacttttcttcagtcgttccatggccgcacgtatgcagggatggctgcgaccggacaggataaaatcaaaacaggcttcggcccgatgcttgaaggctttcactacctgccatacaatgatccttctgcttttaaagctcttggggaggaaggcgatattgccgcggtgatgcttgaaacagtgcagggagaaggaggagtcaatccggcgagtgctgaatttttatcagccgtacagtcgttttgcaaggaaaagcaagcccttctcatcattgatgaaatccagaccggcatcggacggacgggaaaaggcttcgcatatgagcacttcggactctcaccggatatcatcacagtcgccaaaggattgggaaacggctttccggtcggcgctgtcatcggaaaaaaacagcttggagaagcgtttacccctggttctcacggaacgactttcggaggaaacatgctggcgatggctgctgtgaatgccacattgcaaattgtattccagcctgactttttgcaagaggctgctgacaaaggggcgtttttaaaagaacagcttgaggcagagctaaagagcccttttgttaaacaaatccgaggtaaaggattaatgcttggaattgagtgtgatggcccggttgctgacattattgctgaattgcagacattaggcttgcttgtattgccggccggcccgaacgtgattcggctgctgccgccgctcaccgtgactaaggatgaaatagcagaagccgtcagcaagctgaaacaggcaatcgctcatcattccgctgtaaaccagtgatttttttttcgatgtaaaggcataaaaattcatttttataattaattattcatcaagaggtgggctgttagatggaaggttatttagtgttagaagatgggacatcgttcagcggcgagctggacggtcatgaaaactgtacgggagaagctgtttttttcacaggaatgacaggctaccaggaagtgctgacagatccatcatataagggacagattattgtatttacctacccgctgattggcaactacggcataaatgaaaaggattttgaaagcaagaaaccgcaagtaaaagccgcggttgtctatgaggcgtgtgatcacttttctcattatgaagcggtatacagcctcaaggagtatttacagaaatggaacattccgctgttaacccatgttgatacgagggctgtcgtgaagaaaattcgggcaaacgggacgatgggtgcaacagtcacagcctctaaagaaggagctgagattgcccttcaacccgagaatgtggcagagcaggcttcagcccaggaaatcagcacattcggcgacgggaataaacatatcgctctcattgattttggctataaaaagtcaatcgcatcatcacttgtcaaacggggctgcaaggtcaccgtggtgccatacaagcaaatggaggccgtatacaacatcaaacccgatggcattgtgctatcgaacggacctggagatccgaaagccattcagccatatttaggaaagatcaaaagcatcatcagccgctttccgactctcggcatttgtctcggacatcagctgatcgcgctcgcgtttggagggaatacttttaagctgccattcgggcacaggggagctaatcatccggtcatcgaccgtgagacgaaacgggtctttatgacaagccaaaaccacagctatgtggttgatgaacagtcgattaatgaagaagagctcacgatcaggtttcatcatgtcaatgatacgtcagttgaagggcttgcccataaaaaactgcctgtcatgagtgttcaattccacccggaagcccatcccggacctgcggaaagcgaatggatttttgatgattatctaaagaatgtgataccagcaaggagagaaatcgcgcatgcctaaagacaccagtatttcaagcatattagtaatcggctcaggcccgatcatcatcgggcaggcggcagaatttgattattcaggcactcaagggtgcatcgcgctgaaggaggagggctaccgggtcattctcgtcaacagcaatccggcgacaattatgactgatgaagccttcgctgatgaaatttattttgagcctctgacagcagaaagcctgacagccatcattaagaaagaacggcctgatgggcttcttgccaatttaggcggtcagaccgcgttgaatttagcggtggagcttgaagaaacgggtgttttaaaagagcacggcgtcaaactcctcggcacatccgttgaaacgatacaaaaaggagaagaccgggaaaaattccgttcgttaatgaatgaattaaaacagcccgtgccggagagtgaaattgttgataacgaggccgatgccctccattttgcggaatccatcggttttcctgttattatcagaccggcttacacattaggcggaaagggcggaggaatcgcccctgataaagaagcctttacagctatgattaaacaggcgctattagcaagcccgatcaatcaatgccttgtcgaaaaaagcattgccggctttaaagagattgaatatgaagtcatgcgtgacagcaataacacatgcattaccgtctgcaacatggaaaatatcgatccggtcggcgtgcatacaggtgactctatcgttgtggcgccttcacaaacattgacagatgaagactatcaaatgctgcggacggctagtctgaccatcatttcagcacttgatgtcgtaggcggctgcaatattcaattcgcgcttgatcctttcagcaagcaatattacgtgatcgaagtgaatccgcgtgtcagccggtcatcggctctcgcatctaaagcgaccggttatccgattgcgaagatggccgcgaaactggcagtcggatacacacttgacgagctgaaaaatccgctcacaggctcaacttacgcaagctttgaaccggcactggactatgtgatcgtcaaatttccgcgctggccgtttgataaattcaaaaacgcagaccgcaagcttggcacaaaaatgaaagccaccggtgaagtgatggcgattgaacggaatttagaagcagcaatacagaaggcagccgcgtcgcttgaattaaaaaatatcgggacacaccttccagagctcagcggcttgtcaattgatgcgctatgggagttggcagtcactccggatgaccgcagatttttcgttgtcatggagctgttgagccgcagcgtctcgattgatgacattcatgcgaaaacaaaaattgatccgtttttcctgtatacctttaacaacatcatcaaattggaaaaccgcctgatggaagagggcggcgatctctcttttgacttattgaaaaaagcaaaggaaaaggggttctcagacgcaacgattgcctcattgatcggcaaaacagaggaagaggtgcgcgcgcttcgcaaggagatgggcattacaccttccttcaaaattgtcgatacatgcgcggctgagtttgatgcgaaaacaaactatttttactccacatatttcggagagaccgatggagatatcagccgcaaagagaaaaaacgcgcgctgattatcggatcaggaccgattcggatcggccaaggcgttgaatttgattacagtgcggttcacggcgtgctgacactgcaagagcttgggttcgaaaccatcatgattaacaataacccagaaacggtcagcaccgattatgaaattgcggatcgcctgtattttgaaccgatgacaacggagcatattgtaaacgtggcggagcaggaaaatattgattttgcaattgtgcaattcggcggccaaactgcaatcaatgctgctgaagcgctcgaaaaagccggcattactcttcttggcacatcatttcaaacgctcgacgtgttagaggatcgggatcaattttatcagcttcttgacgagctgggattgaagcacgcaaaaggagaaattgcttatacaaaagaagaagccgcttcaaaagcgagtgagatcggctatccggtgttaatccgcccatcttacgttatcggcggaatgggcatgatcattgttgactcgcaagcccagctttctcagctgctgaatgatgaggacagcatgccatacccgattttgattgatcagtatgtgtctggaaaggaagtcgaaattgatatgatttccgacggcgaggatgtctttatcccgacatataccgagcatattgaacgggcaggtgtccattcaggggacagctttgccattcttcccggaccgtccatcacgagcgggctgcagcagggcatgaaagatgcggcacaaaaaattgcccgaaaactttcatttaaaggcatcatgaacattcaatttgtgatcgacaatggaaacatactcgttcttgaagtgaatccgagagcgagccgcacggtgcctgtcgtcagcaaagtaatgggcgttccgatgattccgctcgccacacgactgctggcgggagcgtccttaaaagatctaaatccggaagttcaaaatcatcatggagttgccgtgaagttccctgttttttcttctcatgcaatccaggatgtggatgtcaagcttgggccggaaatgaaatcaacgggagaaggcatgtgtgtcgcatatgattctaacagcgccttgaaaaaaatctatacaagagtctggagtcaaaaaggaagcatttatttgcaaaacgttccggaagaagtgaaggagttagcagaaaacgcaggttttacaattcatgaagggacatttgcctcatggatggaacaggaaggaaaatcgctccacatcaatctgagcggttctgaagaagcacgcaaagaacgtttggaagccatgacgcacggcatccccgtctttacagaagaagaaactgtgcgggcgtttttacaaagcggttcaggccatccgcagcctgtatctctcaaagacctctataaaaaggaagtggcatcatgcacacagtgacgcaaaccagtttatacggaaaagatttattaacgttaaaggaccttagtgaagaggatataaacgccttgctcgcagaagccggtgagctgaaacaaaacaaaattcagcctatattccatggcaaaaccttggcgatgatttttgaaaaatcatcaacgcggacccgtgtttcatttgaagcgggcatggcgcagctgggcgggaacgccctctttctaagccagaaagatctgcagctggggcgcggtgagactgtcgctgatacggcaaaagtgctgtcaggctatgtggatgccatcatgatccggacctttgaacatgaaaaggtggaggaacttgccaaagaagctgacattccggtgatcaatggacttaccgataaataccacccatgccaggcgctggcggatctcttgacgattaaggagataaaagggaagcttaaaggcgtaaaagtcgcatacatcggtgacggaaataacgtggcgcactccttgatgatcggctgcgcgaaaatgggctgtgatatctcgatcgcttcgccaaagggatatgaagtgttagatgaagcagctgaagcggcaaaaacatatgcacttcaatccggctcttctatcacgctgacagatgatccgattgaagctgtaaaagacgcggatgtgatttattctgatgtgtttacaagcatggggcaggaagcggaagagcaagaacgtcttgctgtctttgcgccttatcaggtgaatggggcgctagtcagccatgccaagcctgactatacatttttacattgtctccctgcgcatcgtgaggaagaagtgactgcggagattattgacgggccgaactctgcagtgttccagcaggcggaaaaccgtcttcatgtgcaaaaagcactgctgaaggccattttatataaaggggaatcatcaaaaaactgctgagccaaactcagcagtttttttgatggcaacatattcacagccgcttaggcgcatactacagcaaaaaggaaaaggaggaaaaacagtgggacagcagcaccaattccggcccggacagaaagcgcctaataacggtgtctacgtagaaatcggcgagacagggagcatggttaaaaaccctcaaaaggtccatctgtcagcaggggaaatgttccccgaaacatcaaaccacaaccggctgtggacctacaaaagaaagccgtgaccactaaaaaacccaaaacaataaatgttttgggtttttggctttttaatgctggcttgcatttttgttcataggcatgatttctgctaaaaccatgattaagacatacagtacaacagcaatgacagatgatgttttgaaattatacgtaacgctgttcatgcttgcaaccaagtagcatgccatatgtgataaaaggaacgtccaaataaaggcaataatatatcgcacgtttccacctcgtccttctcattctattctaaaagttatcataccatacaaaaagcgaagggggaatccaattttagcagaaagtgaggtgacaaaagagtctgattcgtcacactttaatggtaaaatataaaacgtcaatcagtataatagccaaaaatgtaaaaggctaggactttaccttattcgtttcttttctatttacataagatagcgtgagatgaagtgtgaaaggaggcgggcaagcgatgggaataacggaaagatactttcaactgggaacggagcataatgtcattcatctgccctatcgcccgaacggcttcggcatctttatcttgggggacagaacccactttgtcggacatgattcaagcttttggcagcagcattatggcagaaatcagcttctgagcatgttgatgaatgaaggatacactctttttaacagcaatctgttcggaaggcattggggggcggaaaaagcagtcacctatgccaaacagctgatacattctgtactgaagcaggaaatcctcaatccgaagattcatattttagcagaaggcatgggtgctctcgtggccgatgaactgcttcgtttttccccggatcatatccgctcagccgcaatgttgaatccttgtctcgatcttcaggcacattatgaatcggaaaaagaaaataaatttttctataaacaatttttgaaagaagtatcgaaaagctacggaatttctgaaaaagaagcggaagcgcttcgttataaaacaattcaaagctacccgagcggcgtaccggttcatatatggcagcgtatgaccggatctccatatccctacagtgtacatgcagaagttttcaaggaaaaacagcaaaagcaaggctcaccggtcgacatgacatttcatttatttgagcatccaagcagaatttatgcatcaatttgcaaattctttcacagtcatgaaaaagaattatagagaatataatgacaacagccttctcttttgcggaggctgttttgttttgggaaatgaaaaaccggaagggcggcagatgcaatggaatcaacgctgattgtaggtgcggacgaatttttcggcctttcattatgtgagcgaatgatggatgaaggcatacatgttgacgttgttctggcggaaacagaagataaaatgagacaaatgtacttagaagaaagactcatgtggcttgggagaaatgaactctttcgccagcttgaacacattggagaccaaaattatgatacaatttgtatccagttcggaagttttttgcctttagaccaatgtgattctccttatattttagtatatgaagaagaccgaaaagaatgggaaaaacgtgaaaaaacaggctcggaaaaaaccgtgatcctgccgaaaatgtatgggccatggaaagaagaaacagaggaagacggctattatacaaatgacgtcgctgacgagttgctgagattcctgttagaaccaagccgtcatagcaaagatcagctttttgaattgcaagtcacagaaaaaacctcaaaagaagaagcaaaaacaaaaattatcgagtggaaaagacaattttcatcaattttcgacaaatattaagaaaaaccttccatgtttcgagttttctagatacaataaacgtataaaaataaacatgttatagcttgtcaaaaggagttgaacatgacttgatcacaaggcttgtcatgatcttttctgtcctccttttattgagtggatgtggacaaactccgttcaaaggaaaaattgagaaggtcggcatgctctttcctgatacgattaatgacctcgtatggggcacaaaagggtataaaggattactgaatatacaatccaaatacaatgtggacgtctattataaagaaggcgttaaaacagaagaagatatcataaatgcgattgaggattttcataagaggggcgtcaatctgctctacggccatgggagtgaatatgccgaggtgtttaacttggtcggcgaagattatccagatatggaattcgtcatttccaatgcgaaagcgaaagctgataatgtaacaagtgtccattttagcggggaagcaatgggcttttttggaggaatgactgctgcccatatgtcgaaaacgaatcaggtcggtgtaattgcttcctttacgtggcagcctgaggttgacggttttatcaaaggggccaagtatgaaaatccggatatagaggtaaatacgaaatatacggatcattgggatgatgatacaacagcagtaaagctttatcagaaaatgaagaacgaaggcgcggatgttgtgtatcccgccggagacgggtataatgttcctgttattcagcaaatcaaaaaagacggtctttatgccattggctacgtcacagatcaatcggatctgggcgagaataccgtattaaccagcacggtgcaaaatgtggacaaggcctatgaaatcattgctgaacaatttaataaaggcacccttgagggcggcgatcattactacgacctgaatacgggagtcgttgagatgggaacattcagcccgctcgtcgacaaagactttcagcaaagaatcgccaagctgatcaaaacatacaacaaaacaggcgagctgccaaaaaacgagtaatggagtgacgtcacatgcagcacgaaaaatcacttgaattcttgcaaattgccatgaaatatctccctgaagcgaaagaacagcttgagaaatcaggcattgagctctcaatggaggccatccagccgtttatgaatctatttacaacggtaatggcggaagcttatgagcttggcaagtctgacgctaaatctgaaacagaataagaagaagccacttttttgaaagtggcttttcacatgattttctttttaatagcggagagcatgggcgcaagctcctttaaagcgggcttgatttgatcaagagagttcataattgaaccgatttggtccataatatgcatgtaattaatcgtctcttcgtcgtttgtctgagaaacctgagaaacttcctcttgttgttcctcctccttctcttctgttggttttgctgcatcgccgaacatcattcttgaaaacacatccaactgcatacgcctcctttccatataccatactctatgagtaagatgaactgatagtttagacgaatatattgccatgtgaaaaaaaataggatagaattagtacctgatactaataattgatcacaacctgattgatcttctaaatttaagatataaaggagtcttcccttatgaaagctggaatacttggtgttggacgttacattcctgagaaggttttaacaaatcatgatcttgaaaaaatggttgaaacttctgacgagtggattcgtacaagaacaggaatagaagaaagaagaatcgcagcagatgatgtgttttcatcacatatggctgttgcagcagcgaaaaatgcgctggaacaagctgaagtggctgctgaggatctggatatgatcttggttgcaactgttacacctgatcagtcatttcctacggtctcttgtatgattcaagaacagctcggcgcgaagaaagcgtgtgctatggatatcagcgcggcttgtgcgggcttcatgtacggggttgtaaccggtaaacaatttattgaatccggaacctacaagcatgttctagttgtcggtgtagagaagctctcaagcattaccgactgggaagaccgcaatacagccgttctgtttggagacggagcaggcgctgcggtagtcgggccagtcagtgatgacagaggaatcctttcatttgaactaggagccgacggcacaggcggtcagcacttgtatctgaatgaaaaacgacatacaatcatgaatggacgagaagttttcaaatttgcagtccgccaaatgggagaatcatgcgtaaatgtcattgaaaaagccggactttcaaaagaggatgtcgactttttgattccgcatcaggcgaacatccgtatcatggaagctgctcgcgagcgtttagagcttcctgtcgaaaagatgtctaaaactgttcataaatatggaaatacttctgccgcatccattccgatctctcttgtagaagaattggaagccggtaaaatcaaagacggcgatgtggtcgttatggtagggttcggcggaggactaacatggggcgccattgcaatccgctggggccgataaaaaaaggtgaggtgcacacaagatgactaaaaaaagagtagttgttacaggacttggagcattatctccacttggcaacgacgtcgatacaagttggaataacgcaatcaacggtgtgtccggaatcggtccgatcactcgtgttgacgctgaagaatatccggcaaaagttgccgctgaattaaaagaatttaatgttgaagattatatggataaaaaagaagccagaaaaatggaccgctttacacaatatgcggttgtggctgcaaaaatggcggttgaagatgcagagcttaacattaccgatgagatcgcgccgagagtcggtgtttgggtaggctccggtatcggaggacttgaaacactagagtctcaatttgaaatcttcttaacaaaaggcccaagacgggtaagcccgtttttcgtgccaatgatgattcctgacatggcgacaggccagatttctattgcattaggagcaaaaggggtgaattcttgtacggttacagcatgtgctacaggaacgaactccatcggtgacgcgtttaaggttattcagcgcggtgatgcagacgtgatggtcacaggcggaacagaagcgccgctgacaagaatgtcattcgccggctttagtgccaataaagcgctgtctactaatccagatccgaaaacagcgagccgcccgtttgataaaaaccgtgatggctttgtcatgggggaaggtgcagggattatcgttcttgaagaacttgagcatgccctggcccgcggcgctaaaatttacggagaaattgtcggctacggctcaaccggagacgcttatcatatcacagcgccggcccaagacggtgaaggcggagcgagagcgatgcaagaagccattaaagatgcaggcattgcacctgaagaaattgattacatcaatgctcacgggacaagcacgtattacaacgacaaatacgaaacaatggcgattaagaccgtttttggcgagcatgcgcataaacttgcggtaagctctacaaaatcgatgacaggccacctcttaggagcagccggcggtattgaagccattttctctatcctggccattaaagaaggcgtgattccgccgacaatcaatattcaaacacctgacgaagaatgtgatttggattatgtgcctgatgaagcccgcagacaggaacttaattatgttctcagcaactcattaggattcggcggacacaacgcaacattaatctttaaaaaatatcaatcataatcaagccaaaccggctgcccttaaagggtagccggttttttttgtgtgcataggattaaaagaggaggcgatcacatgagtgtagaacaaacatatagctggctcaggaaggccggttcaatagatgatttggcgcattacattatcccgcttttttcaggtgcggagaaaaagaactggaagggcattctggggcatcttcagcatcatgggatgtttaaaaacataaaagagggtattcagacggtttccaagctgaaggaaaaaggtttttacggacatatccaaaaggaagaacagtacctcaaaaacaaatggcaaggtcctgatgtaccaattgttacgctgccggttgatgaacgaaacaggagaatccgtttagaattcggatcaaaatcaggactcgcctttcaagacaaaatgttcctttttctttcgtcagatttagattttgggtcggtatctgcccttatgacgcatgagtatcatcacgtttgccggttaggtcatctgacaaaagaggaaaaggatgtcacattacttgatacaatcatcatggaagggctggcggaatatgctgtttatgagaggttcggccgaagtcaaacggctgaatggacgacttggtatacaccggaacagcttcaggctttatatgaaaaaaagattgcgccccatcgggatatcaaacgggataatcgattatttccccagctgttattcggcaaaggatatcagccaaaaatgcttggatacgcagttggattcaatattgtaaaaaaatatttaaccgccagcaaggcaagcaccgcagacgggctgtccattcctgctgagacctttttggatgcaatgctttaaaaggataaaataatggaatttcattaataatattacatttatcctaaaaaattcttgattttgcaaaatgattgtaataatatacaactataaaatttttcgataattcaatattatttattatttctgaataaagggattgctttctcttgaaaacgtttgacaacaagaggggggaaaggggagctagcatgagcacacttttagaagtgaataatttaaagacttattttttcaggaaaaaggagccgatccctgcggttgacggagtcgattttcacatcagcaaaggcgaaaccgtcgcgcttgtaggtgaatcgggctccggaaaaagcattacttctttatcaattatgggcctcgtccaaagctcaggcggaaaaatcatggacggctctattaaactcgaagacaaagacctcacctcattcactgaaaacgattattgcaaaatccgcggtaacgaagtatccatgatctttcaggaaccaatgacctcccttaatccggtgttaacaatcggagaacaaattaccgaagtgctgatttaccataaaaacatgaagaaaaaagaagcccgtcaacgagctgttgaactcttgcagatggtcggtttctcccgggcggagcaaattatgaaggagtacccgcatcggctgtccggcggtatgagacagagggtgatgattgccatcgcactgagctgtaatcctaaactgctcattgctgatgaaccaacgacagcgctggacgtgacaatacaagcccaggtgctggagctcatgaaagatctctgtcagaagttcaatacatcgattcttctcatcacacacgacttaggtgtcgtgtctgaagctgccgatagagtgattgtcatgtactgcggacaagtcgtagaaaacgccactgttgatgacttatttttagaaccgcttcatccgtatacagaaggcctgcttacgtcaattcctgttatagatggagagattgataaattaaatgcgattaaaggcagtgtgcctacaccggataatctgccgccggggtgccgttttgccccaaggtgcccgaaagctatggataagtgctggacaaatcagccttcgcttttgacacacaaaagcggaagaacggtgagatgctttttatatgaggaagagggtgccgaacaatcatgacagcagctaatcaagaaacaatcttagagcttcgtgacgtaaaaaaatactttccgatccggtcaggcctttttcaaagaaaagtcggtgatgtaaaagcggtggatggtgtttcattttcgttaaaaaaaggagaaacactcggaatcgttggagagtcgggctgcggaaaatcgactgccggcagaacgatgatcagactgtacaaaccgacagagggccaaattctttttaaagggcaggatatttccaatctgtcagaggagaagctgcggaagagtgtccgcaaaaatattcaaatggttttccaagatccatttgcttcgttaaacccgagaaagaccctgcgttccatcataaaggagccgtttaatacgcacaacatgtataccatgcgtgaacgaaacgaaaaagttgaagagctgcttgcaagagtagggcttcacccgtcgtttgccggccgttatccccatgagttttcaggcggccagcgtcagcggatcggcattgccagagcactcactttgaatccagagctgatcattgcagatgagccggtttccgcacttgatgtatccattcaggcccaagtgattaacttgatggaggaattacaggaagaatttaatcttacgtatctatttatctctcatgatctgagtgtcgtccgccatatcagcgacagagtcggagtaatgtatcttggcaaaatgatggaactgaccggcaagcatgagctttatgacaacccgcttcacccatatacccaagcgcttttatcctccgttccggttacaagaaaaagaggttctgtcaaacgtgaacgcattgtcctgaagggagaactgcctagtccggccaacccgccaaaaggctgcgtattccacacaagatgtcctgttgcaaaaccgatatgcaaggaacaaataccagaatttaaagaagctgctcccagccactttgtggcttgtcacctttatagctaatgttgcccgcacagctttgagagggggtatgcacactacataaacaacagcctagaagaacgaacatttcaagagggggaatatctaatgaaaagacggaaaaccgcactgatgatgctaagtgtattgatggttctggccatctttttatcagcctgctcgggatcaaaatcaagcaacagcagcgcgaaaaaatcagcaggcaaaccgcagcaaggcggggatttggttgttggttcaatcggagcgccaacacttttcaactcattatattcaacagatgaatcaagtacagatattgaacaaatgatttacagctttttaacgaaaaccgatgaaaacttaaatgtcaaaatgtcactggcggaaagtgtgaaagagctggatggcggattgaaatatgacgtaaaaatcaaaaaaggcgttaagttccatgacggagaagagcttactgccgatgatgtcgtctttacgtacagcattccgcttaacaaggattacaaaggagagcgcggctctaactttgaaatgctgaaatcagtagagaaaaagggagattatgaggttttatttacgctgaaatacaaagaccctaacttctataacaatacgttagacagctacgggattctgcctgagcacattttaaaagatgtaccggttgcagagcttgaagataacgaatttaatagaaaaaatccaatcggctcggggcctttcaaatttaaagaatggaaagacggacaatacgtgaagcttgttgctaatgatgactactatgacggccgtccgtatttagacagtgtcacgtataaaatcattcctgacgccaatgcagcagttgcccagcttcaggccggagatattgatttctttaacgtgccgtcaactgactataagacagctgaatcgtttaataatgtcaaagtcgtaacagatttagcgttaagctatacgtatatcggttggaatgagaaaaatgagctgtttaaagacaaaaaagtgcgccaggcgcttacgacagctttagaccgtgaaacaatggtgcaaaccgtattagatggggacgggaaggtcgcttatatccctgaaagcccggtttcatggaactatccgaaagatatagaggttcctaaatttgaatacaacgtcaaaaaagctaagaagatgctgaaagaagccggctgggaagatactgacggtgacggcatcctcgataaagacggtaaaaaattcgagtttacactgaaaacgaatcaaggaaataaagttcgtgaagacattgcagttgttgttcaagaacaattgaagaaagtcgggattaaggtaacgccgcaaatcgttgagtggagtgcattagtagaacagacaaatccacctaattgggactatgacgcaatggttttaggatggagtttatcaacgttcccagaccattacgatatcttccattctagccagtctgaaaaaggcttaaataacatgtggtacaaaaaccctgaagttgataagcttctcaaagatgcaaaatcaatcagtgaccgtaacgaatactcaaaagcttacgaaaagatttaccaaaaacttgctgaagatcagccgtataccttcctttactatccgaacaaccatatggcgatgccggctaacttagagggttatgtgtatcatccaaaacgcgagttgtaccaaattgaaaaatggtggcttgcccaataatttataattttcccttgcaggggagggagtgcgtttccttcccctttgaatttgaaaaagaacaacgaaggggacaagaatatggttacatatattattcgaagaacgttatcttcgattcctattcttttgggaattacaattttgtctttcattattatgaaagccgctccaggggacccgatgacacttatgatggatcctacgatcagccaggcagacagggctcagtttattgaaaagtacggtctcaatgaccctgagtatgttcaatatttaaaatggctgggcaatatggttcaaggcgatttcggcacatccatcatcagaaaagggacgcctgtttcagaactgattttagcacggctgcccaacacactcctcttgatgctggtgtcaacaattttggcgctgatcatttccatcccattcggggtaatttctgcaaaaaaaccttattcgaagctggactacggcattacatttacttcatttatcggtttggcaatcccgaatttttggttcggtttgattttaatcatggtgtttgccgtgaatctcggctggtttccaaccgggggagtcgccacccttaactcagatttcagtatagtagaccggattcatcatttgcttttacccgcttttgtgctggcgacagctgatatggcaggcttaacgagatatacaagatccaatatgcttgatgttttaaatcaagattatatccggactgctagatcaaaaggtttcaaagagaatcgagtattatttaagcacggcttgcggaatgcactattgcctgttattacgattttcggcttaatgattccttcctttattggcggagcggttgtcgtagagcagattttcacttggccgggattaggaaagctgtttgtcgattcagcattccagcgcgattatccggttatcatggcaatgactgtgatctcggcggttcttgtcgttgtcggaaacctcattgcagacatcctttacgcgattgttgatccgcggatcgaatattaaaaggagggaaacagagatgtcagagctgcaaacaactccctcgccggagatcaggctgaaagaaaatatttcgaaaaagccagaaacaatgacaaagattttctgggaaaaattctcgaaaaacaaactggccattttaggtgccgttattctttttatcattattatgtctgctgttttcgcccctttaattgcaccttatccccaagagcagcaaagcctgcttgataaatataaggcgccgggccttgaacatctgatgggaacggataaatttggacgtgatattttcagccggatcctatatggagcgcgtgtctctttattggttggatttgcgtccgtagtcggttcgattttgatcggaacggttttaggagcattagccggatatttcagaggaatagtggatgctgtcattatgcgtgtagttgacattgtgttatccattcctgatattttcttgttgatcacgctggtcaccatcttcaagccgggtgtggacaaactgattttaattttctgtctcacaggatggaccacaacagcacgattagtaaggggagaattcttgtcgctccgttcaagggaatatgttcttgctgctaaaacaattggaacaaaaacgcacaaaattattttttctcatatcctgcccaatgcgttagggccgattatcgtgtcagctacgctgaaagtagggtctgttattctagctgaatcggcgctaagctacttgggctttggaatccagccgccaatcgctagctgggggaacatgcttcaagacgcacagaatttcacagtaatgattcaagcatggtggtacccgttatttcccgggctatttattttaatgaccgttttatgcttcaactttgtcggtgatggcctgcgggatgcgcttgacccgaaaaatattaaataaaaatgaatatcatatctgttataaaatatcaccaaatcagaaaaaaagcaggtctccttttgtcagaaaatatacaaagagatctgctttttatgattcttacataaacccactgattccagatttcctcaatctctttggaataatttctctatcccttgcctatactgtggacaacagtttttataaaagtgaggggttagagatgttatttcttcatgatgtgtgggtcaattggtttgaaggggaagaaaatggctacaatgtatgccactttcacgaatggcgcaaggaagatacggttgagcttttggatcaggtgccgctgttaagggtgccgtcagtactgtttcattacatagaaaacgatttgtcagagcttccgaaaggtttgcttgaagacgtacatcagaaatcgtacattcggaaaaatcatgagcggacaaagcttgagtattgttttgtcgtaacagacggaatcggcattttagctgtcgacacgatcggctacacgatccctgtcagaaaaagccgtctgatcccaagacaggagcagctcgtttatgaaatggtaaaagatgtagagcctgaaacatatgaatttgagccaaagaagctggaatcctccaaggaatatcacatcttatcattagcaccagaacatgtcagaggactgacaagaaaagaacggcaaatcaagcagctgatgtttatggcgcttgaccaattaaaagggctgaaaaaccgggcggaaattggttactggtacacagagtggaatccgcatatgtatgaacaaatcaaaaggatgagctttgaagagatttgggacatgctgtataacgaaacaattgaaggctggtcggacaagcacctagctttttgcgaaaacctaataaaaggacagccttttttcgaaaagctttgggaaatggaaaacgaatcaaaggtcaactgaaaaaaaccgctctttgcaaagagcggttttttgattagcgtctttttcttccaagacccatggcattctccatttttttcagcattttgtttgctgtccggttcgcccgttccgcgccttcatcaagaatccggtctaattcttcagattctatcagctcataatagcggtcctggatcggttttaatgcgttcaccacgacttctgccaaatcacctttaaactcgccgtagccttttccttcgtactttgcttcaagctcttcaattgtcgtattgccgaggattgaataaattgtaagaaggttggaaacgcccggtttgttttccttatcaaatttgacaatgccttcagaatccgttacagcgcttttgattttcttttcaagctgcttcggctcatccagcagggtaatataagctttctggttcggatcagatttgctcatcttcttcagcggatcattcagagacatgatgcgtgcaccgacttttggaattttcacttccggaatcgtgaagatgtcgttgtattttttgttgaagcgttctgcgagattccgcgtcagctcaaggtgctgcttttgatcctcaccgacaggcacgagatccgttccgtacagcagaatatcagcggccattagcggcggatatgttaacaggccggagacgacagcttcattgcctttggatttgtccttaaattgagtcatccgctcaagctcgccgatatatgcgacacactgcatcatccatccggcctgcgcatgcgcggggacctctgactgaataaacaatgttgctttttctggatcaagtccgacagctaagtaaagcgctgcgagattgcggatattctttctaagctcaagccggtcttgaggaacagttatcgcatgctggtccacgatgcaaaaatagctgttataatcatgctgcagttcgacaaactgcttcattgcaccgatatagttgccgagcgtcactgagccgcttggctgaatgcctgaaaaaatcgtttgtttcatgaaaacatcaacctcatttcttaaaacataataaaaaaggctcattcttcccctgtaaaaaagggacgaatgaaccgtggtaccaccctgattattccattaaaatgaaatcactctgacgtttgtaacggagactgctccggctgagcctacttttttccagttcggtcagctgctccaaagtccattccacattgcccgttatctgctcccagcaccgcagactctcttcaaacaggtgaaatgtgtactactctttttcatagcaagcttttcttttgattgcttcattataaatcaattataaccaattgtcatcatgaaaaaacattcttttttccagtaaaattgtaataatataaataacacgagtgttgtaaaatccttaaatgataactgctatcagcgtaaaaacaggcagatattatatgtaaaaagcaatatgggcagaagacacatgaaaaagtttttaatcaatttatgctttaaatggtagaaggatattatgttcatggaagaaaaactaacgaagtttaaatattttaaattgataaaataatattgcaataaattatttgtttcattataatgaacttgttcactctattgttacagcttttttacaaaaataatcagaaaagacggaacagaataaaagtttgtgaaaactcaggttcatttgtctgatatttctgaggatttagccgtaaggagctgaaaattattattagggggtttgcgaatatgaaaaaacgttggtcgattgtcacgttgatgctcattttcactctcgtgctgagcgcgtgcggctttggcggcagcggatcaaacggtgaagggaaaaaggacagtaaaggaaagacgacacttaacattaatattaaaactgagccgttctccttacatccgggattggcaaatgattcagtttcaggcggtgtcatccgtcagacttttgaaggattgacacgcatcaatgcagatggggagcctgaagaaggcatggcatccaaaatcgaaacaagcaaggacggtaaaacatatacattcactattcgtgatggtgtgaaatggtctaatggagaccctgtaacagcacaagattttgaatatgcttggaaatgggcgcttgaccctaataatgaatcacaatacgcttaccagctctactacataaaaggtgctgaagcggcgaataccggaaaaggcagcctagacgatgtggcagtaaaagctgtgaatgacaaaacgctgaaggttgaattaaataacccgacgccatatttcactgaattaactgcgttctatacgtatatgccgatcaataagaaaattgcagagaaaaataaaaagtggaatacaaatgccggagatgattatgtatcaaacgggccgttcaaaatgacggcatggaaacacagcggttctattactctcgaaaaaaatgaccagtattgggataaagacaaagtcaaactgaagaaaatcgatatggttatgatcaacaataacaatacggaactaaaaaaattccaagctggcgaacttgattgggccggtttgccgctcgggcagcttccgacagaatctctcccttccttgaaaaaagacggttctttacatgttgagccgatggcaggtgtgtattggtacaaattcaacactgaagctaagccgttagacaacgtcaatatccgtaaagcattatcttatgcgattgaccgtcaatcgattgttaaaaacattacgcaaggtgaacaaatcccggctatggctgcggtgccgccgacaatgaagggatttgaggataacaaagaaggctactacaaagacaacgatgttaaaacggcaaaagaataccttgaaaaaggcctaaaagaaatgggcttaagcaaggcatctgaccttccgaaaatcaaattgtcttataacactgatgatgcacatgcgaaaatcgctcaagctgtacaagaaatgtggaagaaaaatttaggcgttgatgttgagcttgataactcagaatggaatgtctatattgataagctccacagccaagattatcaaatcggccgtatgggctggcttggggacttcaatgatcctatcaacttcctagaattgttccgtgacaaagacggaggaaataacgatacaggctgggaaaacccagaattcaaaaaattgctgaatcagtcacaaactgaaacagatcaaaacaaacgtgcagagctgctgaaaaaagcggaaggtattttcattgatgaaatgccggtagctccaatttatttttatacgattccttgggtacaagacgaaaatctgaaaggaactattattactggaactggagaaatttacttcagaaacgcgtactttcaataagtcttatttgtgaaaacaataacctcaaggtatatggggacctatttcccatatacctttcttactgaggaatataaaaaagtaaaaaccatggaggtgttcccccttgctaaaatatatcggaagacgcttagtctatatgattatcacactatttgtgattgtaactgtgacattcttcttaatgcaagcagcaccgggcgggccattttcaggtgagaaaaagcttccgcctgaaattgaagcaaacttaaatacgcactatggcttggacaagccgctgtttgtacaatatgtcagttatttgaaatcagttgcaatgtgggatttcggaccgtcatttaaatataaaggtcagagtgttaacgacctgatcagttcaggtttccccgtttcatttactcttggagcagaagctattctcctcgctttagcattaggtgtattgtttggagtcattgcagctctttaccataataagtggcaggattataccgtcgcgattttaacgatatttggtatttcggttccgagctttatcatggcggctgttctgcaatatgtgttctccatgaagcttgggctgtttccggtcgcggggtgggattcctgggcatacacctttttgccttcaatcgcacttgcttccatgccgatggcgtttattgccagactttcccgttcaagcatgatcgaagtgttaaacagtgattatatccgcacagcgaaagcgaaagggctgtcccgcccagcggttacagtgcggcacgccattcgaaacgcgcttttgccggttgttacatatatgggcccgatggccgcacaggtcttaacggggagcttcattattgaaaccatttttggtatccccgggcttggtgcacacttcgtcaacagtattacaaaccgtgattatacggtcattatgggtgtaacggtgttcttcagtgtcatcctgctattgtgtgtattaattgtagatgtgttatacggcattattgatccaagaatcaagctttccaaagcaaagaaaggagcctaggccatgcagaacattccaaaaaacatgtttgaaccagccgcagcgaatgccggcgatgcagaaaaaataagtaaaaagagcctttccctctggaaagatgcgatgcttcgcttccgcagcaataagcttgcaatggtcgggcttatcattatcgtacttattatccttatggcaatttttgcgccgatgttctcaaggtatgattattcaactactaatctcttaaatgcggataagccgccttcaaaagatcactggttcggaacagatgatcttggacgggacattttcgtccgtacatgggtaggggcgcgtatctcaatctttatcggtgttgcagctgctgttctcgatttgctgatcggcgttatttgggggagcatttcaggcttccgcggaggcagaacggacgaaatcatgatgcgtatcgctgatatcctttgggcagttccttcattattaatggttatcttactgatggttgttcttccgaaaggtctatttacgattattattgccatgacgattacaggctggattaatatggccagaatcgtgcgcggacaagtgctgcagctgaagaatcaggagtatgtgcttgcttcacagacactgggtgcaaaaacatcccgtcttctgtttaaacatatcgtgccaaacgcaatgggttctattttggtcacgatgacactgacagttcctactgcaattttcacagaagcctttttaagttatttgggacttggtgttccggctccgctggcgagctggggaacgatggcttctgacggattgcctgcattgacctattatccgtggcgtttattcttccctgccggatttatctgcattacaatgtttggtttcaacgttgtcggcgacggattaagagacgcattggatcctaagttacgtaaataagggagtgatacgggtgacacgcctattagaagtaaaagatttagcaatttcatttaaaacatatggcggagaggtccaggcgatccgcggagtgaatttccatctggataaaggggagacgctggccattgttggagaatcaggttccggaaaaagtgtaacctctcaagcgattatgaagctgattccaatgcctccgggttatttcaaacgcggtgagatcctgtttgaaggaaaggatctggtgccgctgtccgaaaaagaaatgcaaaatgtccgaggaaaagagatcggcatgatatttcaggatccgatgacctccttaaatccaacgatgaaggtcggtaaacaaattacggaagtgctttttaaacacgaaaagatctcgaaggaagcggctaaaaaacgcgcggttgaactgctggaattagtcggtatcccaatgccggaaaagcgggtgaaccaatttccgcatgaattttcaggcgggatgagacagagggttgtcattgccatggcgcttgcagcgaatccgaaacttctgatcgccgatgagccgacaactgctcttgatgtaacgattcaagcgcaaattttggaattaatgaaggatttgcaaaagaaaattgacacgtccatcatctttatcacacacgatcttggtgttgtggctaacgttgctgaccgggtcgctgtcatgtacgcgggacagattgtagaaaccggtacggtagacgaaatcttctacgatccgagacatccgtacacttgggggcttcttgcatccatgccgacactggaaagttcaggagaggaagagctgactgcaattccgggcacgccgcctgatttgacaaacccgccaaaaggagatgcttttgccctgcggagctcttacgcgatgaaaatcgattttgaacaggagccgccaatgtttaaggtatccgatactcattatgtaaaatcgtggctgcttcatcctgacgcgccaaaggtagagccgcctgaagcggtaaaagcgaaaatgcgtaaactggcaaatacgtatgaaaaacctgtcttagtgagagaaggtgaatgaattgactgaaaaattattagaaatcaaacatttaaaacagcactttgtcacaccaaggggaacggtcaaggctgtagatgatttatcatttgatatctataaaggtgaaacattagggctggttggtgaatcaggctgcggtaaatcgacaacaggccgaagcattatccggctgtacgaagcaaccgatggtgaggtgctgttcaacggcgaaaatgtgcacgggagaaaatcgcggaaaaagctgctggaattcaaccgcaaaatgcagatgattttccaagacccatatgcatccctgaatccgagaatgacagttgctgatattattgctgaaggccttgatattcataagctggcgaaaacgaaaaaagagcggatgcagagggtccatgaactattggaaacagttggtttaaacaaggaacacgcgaaccgttatccgcatgaattttccggcggccagcgccaaagaatcgggattgccagagctcttgctgttgatccggaattcattatcgcggatgagccgatttccgctttggatgtatccattcaagcgcaggtcgtgaatttaatgaaagaactgcaaaaagaaaaagggctcacatatctgtttattgcccacgatttatcgatggtcaaatacatcagtgaccgcattggcgtcatgtatttcgggaaactggttgagcttgcgccggcagatgagctttatgaaaatccgcttcacccatatacaaaatcattgctttctgctattcctcttcctgatccggactatgagagaaatcgcgttcgccagaaatatgatccgtctgtccatcaattaaaggatggggaaacgatggaattccgtgaagtcaaaccgggacattttgtgatgtgcacggaagccgaatttaaagctttttcatgattcatcaatccttcaagagatttctcttgaagggtttttttgcgtcctcatagaaagtgagaatgataacatttacaattagaggaaaaaagcggaggcgaaatacgattcaatttctgcataacaaaaatgtttttgcgctattgctgtctcaatcttttcaatctttagcaggtgtcctcgtcacaatcgttttaatggtccgggtctatcaaatgactgactccgtttttttggcgggccttattttatcgttcatgtcgtttgcgagtatagcagcaagcttttgcgtctctccggtgcttcgcattctcggttttaaaaaggtgcttgcgggagcgaatctgctgagagcggtctttacaatcctgatggcatacagcgtcactcatcacggacaggcattcttttggattacgctgctgtttgtgttttgtttttccttcgcgggcgctttttttcagccggcaagatttgcgctgctgccgattattgttccaaagaagcaatatgtaaaagcgaatggtgtgatctccctctcgaatcaattgttcttaacagcaggctggggccttggaggccttctgacgtacgccgttccttttgaactcgttgtcggcgctgccatttgcctgtttgttctatcgggagcttccatcagtgtgttgcatgtaaatgaagaagaggctgcaggaactgctgaaacagcatctgtcagaagtatatggaaggatttaatgatcatccctattgtaagagacattactgtaatggacatgttagaagctttggcgggttccgtatggtcatctgctattctcctcgcatttactgcggctgttttgcatgaaacagaggtgtggtgggggatgtttaacgcttcctattttataggcgcaattgtcggcagtgtgattgctattcgtttttcttctttttttgagcggaatatgggctatgccattatgttcagctcgcttgtaatgtcggcgctgacccttttgttttcattttctccagtcccatttttatgcgctctggcttgtgctgcaatggggcctttttatcaggtgcgtgatatttgccaggaaaccatgctgcaggaggttattcccgagcagaaacgaatcggaatcatggctgcaaaaaatgcgattttgactccttggtcaggcgtcacctactccattatggggctagtggctgatgctgctggtgcgaaaatagcttttatcgcggctgctgcattatatatcatgacatttctgattgcactggcgcagccccgcctgattcattacaggcgggaaaaccgagttcaatgagatacacttcaaaatgaacggagcagctggctccgtttttgctgaaaaaaaatgaaaccatggcggaagttcgcacgtctttatagatgtaaggctgtttaaacaagaagaaatggggtatatctaaaagtatgaagacaacgaactcataaggagcaaatcaatgaactggtatgaaaagcttagcgagtactttccaattgaagaaatgaaatcaaaagcgcatatggaagctcttctgaaagagcgaagcgatatttatcataaagatgaaggcaaacatcatattttaatgtttgcggagttcgattcttttatcttcgttgattatctgtatgtgtctaaggatgcaagagggcaggggcttggcggcaaattgatcgcgaagctgaaaaagaaaaataagcccatattgctcgaggtggaacctgtggatgaagatgatactgatacagaaaaacgcctgaggttttatcaaagagagcatttcaagcatgctcagtcaattgggtaccggcgccggtcattggctacgaatgaagtaaacaagatggagattctgtactggtcaccaaaaacagaatcagaagaagaaattcttgaagccatgaaacagacatatgaaaacattcatacttataaagacgagaaatggtacggagaatcgtacgaaaaaacggatgaagtcctgaaactcattgatgaagaaaaacaaaaaaatattttcgatcagttaagctaattgagaattagaacatatcatgaacattaaaaatttgctggattgacacatttttttcttaggatactgttcacacttacttttttatagtataatacctgtaaagattccttttttagagtaatttcaatttaagaataaaatagatgttcatcctactaattagaggagtgaagatgaatggttacactatacacatcaccaagctgtacttcatgcagaaaggcgagagcgtggctcgaggagcacgatattccatttgtagaaagaaacattttctctgaacctttatcaattgatgaaataaaacaaattcttcgaatgactgaggatggaacagatgaaatcatctcaacccgttcaaaagtattccaaaaactgaatgtgaacgttgaatctatgccgctgcaagatttgtaccgcttgatcaacgagcatccagggttgcttcgccgtccgatcatcattgacgaaaaacgtttgcaggtcggatataacgaagacgaaatcagacgtttcctgccaagaaaagttcgctctttccaattaagagaagcacagcgtttggcaaactaatagatcgtatcatcaaaagaaggctgagtcatcagccttcttttatttttcaacctgctggtaataaatgctcgcaagaatgacaaacgcaaccgtcaaaatggggaggagcgtttcaactgtgccgtgctgcgccataaaaagagacagctttttgtctctgacaatcatttctccgccagtataagcaagcagcccgcttcccgcgtaaatcagaagcggtattttctctagtgcaatatggatgagtttgctgccccaaataataaccggaaccgatacacacaaacctataacaacgagagaaaactcaccgtgtgatgctcccgcaactgcgatgacgttgtccagcgacataaagagatctgcaagcacaatcgttcgtatcgctctccacagggaggtgctgcttttaatgtgcttcgtgtcttttttttcaatcagcagctgatatcctaaatacagcaggaaaattccgccggcgcactgcaagaacggaatgttcaaaagatatacagctgcacttgttaatccgattctcatggcaacggcaataaatgttccgagaataatggcttgctgtctttgcttgtccggcaaatgtctgctggccatggcaataacaaccgcgttgtctccgccgaggatcaggtcaatcccaacaatgacaagcagagaaatcagatagtcatgctccatgaagcggcacctcgctttcagtccttcgcttgtactactactatatgagacaggttgtattttatgatatcagccgcctgaactgccgttttttaggaaaaggtgcatttttatttcttttgtgactgttttatcataaaatagaaatacaaaggaattcacactggccttggttaaggttaagatgtggacggaatgggtaaagtgtagtaaagtacaattaatcgggagcttagatgtcccttcaacatcttatatagaagggaaggttggcaaatggaaattgaaagaattaacgagcatacagtaaaattttatatgtcttacggagatattgaagatcgcggttttgacagagaagaaatttggtataaccgtgagcgcagtgaagaacttttctgggaagtcatggatgaagttcatgaagaagaggaattcgctgtggaaggcccactttggattcaagttcaggcactggacaaaggattagaaatcatcgtcacaaaagcccagctttccaaagacggacaaaagctcgaactgccgattcctgaggataaaaagcaagaaccagcatctgaggatcttgacgccttgctggatgatttccagaaagaagagcaagccgtcaatcaggaagagaaggagcaaaagcttcaatttgtcttgcgatttggcgattttgaggatgttatttctctatctaatttgaacgttaacggaagcaaaacgactttatattcgtttgagaaccgatattatttatatgtagatttttgcaatatgactgatgaagaggttgaaaatcagctaagcatcctgctggagtacgcaaatgaatcctcaatcagcatacaccgtcttgaagagtacggcaagctgattatttcagagcatgctctagaaacgataaaaaaacactttgcatcatagcaaaccgatttccttccggaaatcggttttttttatgcacgaaaatgccattttagagatgtgaaaaatcaaaaacatatagacaagcggaaaatacagcgaacaggagttgatcatcttttccagaaagtatacttcatctggaaaggagagatgacaattgtttagtgctgtgactgaagacggccaaatgtttcaccttctaggcgctcagcaaaaccagaaattaaagcggagacggttcttctgtccggtatgcgggggagagctagctgtgaagctcggacttcaaaaagcgccgcattttgcccataaacagaacaagtcctgctccatagatatcgaaccggaaagcgcctaccacttagaaggaaaaagacagttgtatgtatggctgaaaacgcaacgggcttcaccaatattggagccgtatataaagacaatcaaccaaagaccagacgtcatggcaaggatcaaggagcatatgcttgctgttgaatatcaatgcgccactatcgctccagatgtctttcaaaagcggacagagggcttcaaacaagaaggaatcatcccgcagtggattatgggatacagccgcttaaaacggactgcttcgtccttttatcagctttcagcttttcattggcagtttatcaatgcaagtccatacagagaactgatatgttattgtcctgaaaggcgttcttttctccgactcagccacatcattccattctacacaaaccattcttattcctcagtccaaacgatccctatccatcgggcaggtgcagacgatctttttttcactgaaccgaaaccctcaattcaatattcaggctggacgaaagcgattcaccgttttcgccataaaccccatcggtttaactctaaggaaacaaatcgccttaggcagatgttttatgagaagcggcagacatctttttcttttctgccgactgaagtgtttgttcctgttagaaaaggggcagtttttaagagtccggtttttgtgtggcaggggtttctttatttgtttatgacggatcttggagataaacgtgcgccaattcgtttttcagctgttttgcagcagtgcaaactgcacattcataaaaagaacattgcactcaggttcgaatgcagcgaagagtgtctttcagaagcggttaaacagtatattgattttttgtgcaagaagggatttttaagggagactcagaaagaagtatatgtgctgaatcggcctgcaggcggcatacattcaatgcaggatctcatagaaagagaccgcagctgttttatagaatgagtttgtctgatttggctcaccctaagacaaaggtggtgggcaggctgtgaaaggcacaaaaggaaaggtttttcgtgtttttactgcttttttggcattcgttctcttcattactgcatatgatttgacaaaaggcagtgaaaaaccggaagatattcacaacacaagtttattgagaaacagctgttttttcaattggcttgaatcaaagaagacgagggggatcaccatggctgaggaaaaaaaagcaaaccaactgcctgacagaagtgaggtaaaggcagaagacacatggagacttgaggatatttttcctagtgatgaggcctggaataaagaatttcaagctgtaaaagaattaattccgaatttatctaagtataaaggaaagctggcagattcagctgatcatttatacgaggctcttacgtatcaagataaagtgatggagcggctgggtaggctgtacacatatgcgcatatgcgctctgaccaggatactgggaactccttttaccaggggctgaatgacaaggcgggaaacctgtatacacaggccgcaagcgcgacagcttatttggttccggagattttatccatagaagaagacaaactgcagcagttcattcttgaaaaagaagaattgaagctgtactctcatgcgattgaggagattacaaaggaacgtccgcatgtgctgagcgagaaggaagaggcactgcttgctgaagcctccgaggtactggggtcatcttcaaatacattcagcgtgttaaataacgcagatataacgtttccgtccattaaagacgaagatgggaatgaaaaacagatcactcacggcaactttattaatttcttggaaagtgaaaaccgtgaagttcgcaaaaatgcgtttgacgcagtgtataaaacgtacggacaatataaaaacacaatggccacgacgctaagcggcactgtgaaaaaggacaacttctacgcgagagtgaaaaagtacaagtcagcgcgtgaggctgcgctttctaacaacagtattcctgaggaagtatacgataaccttgttaagacgattaataagcatttgccgctcctgcaccgctatattgcgctaagaaagaaagtgcttgagcttgatgaagtgcatatctatgacctgtatacaccgcttgtgaaagatgcggggatgaaggtgacatacgaggaagccaaagattacatgctgaaaggcctcgcacctttaggggaagaatatgcctctatcctaaaagaaggactggaaaaccgctgggtggacgtttacgaaaataaaggcaaacgcaatggggcttattcatcaggagcttacggcacgaatccgtatattttgatgaactggcataataacgtcaataatctctttacgctcgtgcacgagtttggacattccgtacacagctactatacgagaaagcaccagccttatccatatggcaattacagtatctttgtcgcggaagttgcctctacgacaaatgaagcgctccttggcgaatatttgctgaacaatttagaggatgaaaaacagcgcttatatattctcaaccatatgcttgagggcttcaggggaacggtcttcagacaaacgatgttcgctgaatttgaacatctgatccatacaaaggcgcaagaaggcgagccgcttacacctgagcttctgacaaatgtctattacgacctgaataaaaagtattttggagacggcatggtgattgataaggaaatcggccttgaatggtcgcgtattccgcacttctattacaattactatgtgtatcagtatgcgacagggtacagcgctgcccaagcattaagcagccagattttgaaggaaggaaagccggcggttgaccgttatattgacttcctgaaagcgggaagttcacaatacccgattgatgtcttgaaaaaagcgggtgttgatatgacgtctccagagccaatcgaagccgcgtgcaaaatgtttgaagaaaaacttgatgaaatggaagagctgctgatgaaagtcaagcagtcttaaaaagtaagcctgtgcggaaatgacgcacaggcttttttaaaaccctttaaaggttttccggtgattcaagcggtagagggtaaacaaaatagacagaaacagcagaggagaggtaatataaagcggcagcatatgcatcatgcctaagatattcagacagaaaaaaacggcaatgcacacaattgagatcaaagtagacatcatggcgatcctcctcgtcctttttccttataaggatatgagtgaatgcacttcgttatgttttgtgacaaaaatatgaacattaagcatagaggttgtcaaaagtcgacatcttttgttatcataaggatgtgaaattgatcacaaacaaacattacccctttgtttgaccgtgaaaaatttctcccatcccctttgttgtcgttaagacatatgaaaccgcgcttatcccggcgcggtttctttagtgctaaaaacagaacgtacgtttggttatggcgtaaaaaaacagcctcaagcatatgcacgcctgcggctatttttcacatgattgatattcatcagaataagtgctgagagacttccaaaacattccgtgtttggcttccactttggcaacctttttagcaaacgccagttttttcatttctttttctacctcttcaaggctcaggtcatatacaagagcaatttccttcgaggcaacgaagcggaaatattcaataaaacattctaaaggcggtgtttccgacggcttcggctcgtcgccaagcatctcaaataaaatttcttcatatacatcatatgagtagctgccaggaactttaagcccttcatcctcatgctgcgtattaaaaaacgtcagtgtcggattaacagaaacatccatctcagcagcaattttcatgtcacattgaagcgccttgaccgcgctttgagaatgcagatcttttttgaattcttcaagatcgagacttgtattttcagcaatctccaaaagcacgttttcatccgtaatatttttctttgaaacaaataggctctcctgcatatttctgagaaattgcatgccggcttttcgtccttgcaattcggctgctttaaaagcgagagcagccatataaggcgatgaaagcggctgatcctgttcgaaccagacattgccgtcacatgacatgccagagcggctcgcgatcttttcccatgcttctgcgagaagatgcttttttcgctttttatttaaagcggtaaggcttgcggaagcgataatgcgtaaggtgaaaaaacgtccgtatctgattttcagctttttgatgacgggctctaaggaccagcattcaggacataaagggtctacaaacatataaatttcaagcggtttttttggatgaccgtggcaatgggcgaagtatagctcatgctgatagtttgtcaagatgatcgatcctccgcttccgtttgattcaccatatgccttgctgtcaactccagccggccaaacaaaaactcacgaatttcgccctccagccctacatggtacattgcgtccttcatacagctgagccacgcatcagctctctcgtttgtaattggaaagggaagatgccttgctctgagcataggatggccgtgctcctcagtataaagcggaggcccgcctaaatactgagttaagaattgcttctgtttcctggcggtttctgtcaaatcgcttggaaaaatcggcttcagcaaaggatgagacgcgacacgctcataaaaagtatcaacaagttgcgatagaagttcctctccaatcgcttcataaggtgcgttaaacgattgtcccatgttgactactcctttaaatatggctaataggaatcataaatcctattgcaaaaagtaattttctgtatttcattgtttcatctagatttattttagcaacaaggcatcatttctacaaacaaactgccttttatgcgtttgatgacttatttcggctgacagccggggtttgtatttcatatcatatcacataaaaatcaggaatgcgtaagatttcacttcgcaaaaaaaccagagggaaagagcacctctggttacgcgtaataagctgaagttattttttttacatagttttgcgtttcttggaaaggaggaatgcctccgtatcggtcaacattccccggtccggcgttgtaagccgctaatgccatagacacattgccgtcgtatttatccagcatttgttttaaatatttcgttccgccctccacattttgctgcggatcaagcggattggaaacgccaagtgagcttgctgttgacggcatcagctgcatgaggcccatcgcacctactccgctgaccgcttttgcattaaagcctgattcctgtttgatgacggcgcggatcagtttttcatcaacgccatatttatcagcggcttttttaatcgcactgtcaatagaaaagtctcccgaactgatctgatttgctccatgtttgtttgaagctgaatctgcagcagctgtttcagtgctttctgccgcttttgtgattgaacctgaattgctgctcgtatatgagttaagcccatacgctgaaagcagtgacggcgctgttgtattcccgctgttcagcatgttgagcgggcttggcgatgaagaaggtgctgattgctgagatgccagaccgtttgtatattggctgagcaaagagctaaaacttgaaagcgggctttccgtattctgagtgtccgagctgctgcgtgcattagatatggactgtagtgcctgaagctgaagtaaagctgcccaattcgttacattcacgatgtcattccaccttatatagactttcgtttttcttcataaaaacgcagaattttatttttggtttcgcgctgaggaatgctgaattgctgaagcagcttctcgaaagcttttctgccctcatgccaatccgccgcctcaaattcaatttcatagtcctctttatttaaatatcggctgtggtctaaaactattaagcctttttctgtttctttttccgcacggtttgttgctaaagatccaaagtattgaatggcatccgtatcgatctgaagcttgtgcagctggtccttcacagggccctcgggaactgaaaatccagcgagatctgatacctctgaaagctgctggtgcgtttccagaagccccacatcagccggctcctttaatgtaaggacatactttccgttttttctgcggatacgaagcgcagcttgtttttgtttcagcgcgaagctgtctgtatcaaaataatgattcttttgatctgtaaaatctttttctgtcagctggagtgccgctgctatgtttttgaattcttgtttggtcagcatgtttttaaattcgatttcaatttcttggctcatgatgctcttcctttcctccctgtaaatcttatttttactattatctctttagatgttaggtttatcaatatcgagctcgatatgataaaatgaatctgtactttgtttaaaaaaggagagcattatgcaaaacagaatcgaaattttgaatgcaacattatcggatgatcagcttcgccttgcctgtcagacagaaggaaacgaagcggaacgcaagccgtcaggtcaaatgcttgttgattctgaccactttgcttttgtatacatacttgaattagctgattcttttgaatatgtcattataaaggaacatgtatggccggaactgaagcaggcccatgcacaaaaaataccggttgttttagaggcaggagaccaaacaattgaactggcaggcctgcatgaggagctggaatatcttttagaaaatataaaagataatgcaaactatggagaagaaatggaagaaaaagtgaaacgcgtgtttttatagaaactggttcggaattgggggatgtatgatggatgacaaacaatgggagcgttttttagtgccgtaccgccaggctgtcgaagagttgaaagtgaagctcaaggggatccgcacactatatgaatacgaggacgaccattcaccgatcgaatttgtgaccggacgcgtcaagcctgtggcgagcatacttgaaaaagcgagacggaaaagcataccgctgcatgaaattgaaaccatgcaggacattgctggccttagaatcatgtgccaatttgtcgatgacatccaaatcgtaaaagagatgctttttgccagaaaagatttcaccgttgtggatcagagggattatattgcggaacataaagagagcggataccgatcataccatcttgttgtgctgtaccctttgcagacggtatccggagaaaagcatgttctcgtagaaatacagatccgtacactggcgatgaatttttgggcgaccattgagcattcattgaattataaatacagcggaaacattcctgaaaaagtaaaactaaggcttcagcgcgcttctgaagcggcttcccggcttgatgaagagatgtcggagatcaggggtgaagtacaggaagctcaagctgccttttcaagaaagaaaaaaggaagcgagcaacaataggtaaaggggaagaagagcatgaaatttgccgtatcatcaaaaggagatcaagtttctgatacgctgaaaagcaaaatacaggcgtatttattggattttgatatggaactggatgaaaatgaaccggaaatcgttatttcagtcggaggcgacggaacgcttttgtatgcttttcacagatacagcgaccgcttggacaaaacagcatttgtcggcgttcacacaggtcatctgggtttttatgccgactgggttcctcatgaaattgaaaaacttgttcttgccatcgcgaaaacgccgtatcatacagtcgaatatccgcttctcgaagtcattgtgacctatcacgaaaacgagcgggaagaaagatacttagctttgaatgaatgtacgattaaaagcatcgaaggaagccttgttgctgatgtggaaatcaaagggcagctctttgaaaccttccgaggcgacggcctctgcctgtcaactccatcaggcagcacagcctacaataaggcgctgggcggagcgattatccatccgtctatcagggcgatccagcttgcggaaatggcttctattaataaccgcgtgttccgtacggtcgggtcacctctgcttctcccatcccatcatgattgcatgattaagccgagaaacgaagttgactttcaagtgacgattgaccatttaacccttctccataaggatgtaaagtcgatccgctgccaagttgcatccgaaaaagtgcggtttgcgagattccgtccgtttccattttggaaaagagtccaggattcgtttattggaaaaggtgaatagaaagaggacatatcgtggagcatttttttatcagaaagaacattacttccgctgaggacgggatgactgtaaaagaatatgccagtgaactgggaatttcgaaacgtctgctgaccgatattaagtttggcgggggagacctgcagattaacggtgagcatgtgacggtcaaatacgttttgaaagatggagatcttcttatcgtgaagtttcctgaggagcaggtgagcgagacgctgttggcagagcctgttccgctcgatatcctttatgaggatgaacatgtgcttgtgataaacaagcagccgtatgtgtcatcaatcccttcgagagagcacccctccggcagcattgccaatggaattattgatcattatcaaacaaccggagtgagggcgacagttcatcttgtcacccggttagaccgggatacatcaggtgtcatgcttgttgccaagcatcgatttgcccactccattttatcgtctgcgcaaaaaaacggccttgtgaaacgccggtatgcggcagtggttcacgggcggatggcacagatggagggaacagtcgatgctccgattggcagacatcctgacagtattattgaacggacggtaacgccagacggccagaaggctgttactcatttttacgtcacatgtgcaaatgacgacatgacctcggtggcattgcagcttgagactggacgaacccatcaaattcgtgttcatatgagttatctcgggcacccgttgtgcggcgatacactgtacggcggaacgagacaggaaattgaccggcaggctctgcacagcgagcatctttcgtttatccatccgctgacacaggagaacatgacgtttcatgctccactgcctcaggatatgagaaaactgataaaaggagagaatcattgattctctccttttttatatggggcgaaatcttgattcgtcgtaaggcagggagcttggaacagagacggtttctatttctggaaagcgaaagcctgtcagttgatttccgaacacgcagcctgtatcaatgttgatggtgcgattgaccttccgaggctctttcacaggtgtatgaccgtataccacccaagcctttccgttataggctgccgcccaatcacgtctgacgggtctgccgtccggatatgtttcacccgtcacgtcaccgtaaagcacaaagtccttcactctgcgggtatatttgccgatatcgtcagctcttatgccagcatgggcgacaactaattctccattatgtaagatgtcgtaaagcggcgctgtttcgtacagcttcataaactgttcgctgactgattttttctcatctttggaaagttcctcaagctctgccgctgttgtttcgagaccatgcatcacttttaccggatttccttttaagtaacgatataatttattgcaatggtttcccgggacataacgcacagcgcctttttcgtaagcgccggctacaaatcggatgacctctatcgatttgggccctctgtcagttaaatctccggcaaaaacaagcaccctgccttcttcatggacaggtactccatttttgattgtatagccaagcttttggattaatgcagtcatttcgtcatagcagccatgaatatcgctgatgatatcgtaagccatgcggtctcctccttaccgattgttttatttattatgaagcaaagtgttgtgagtcatcacaagcttttatgtgcaaattatagaagaagaatcattttctaaacaggattaagaccttatcactttatttttcatcatcacccttgttaaaatcgcgttatgttttttaaaaatgaggttttgttctctgagtgagaactagcataaccctgacttaaaaaggaggttctgattatggcgcatacatctgtcgcatctttagttgttgtacttatcgttgcatttttgacacccatccttttgcatcggtttaaactcagcatcccggttgttgttgctgaaatcattatggggctgataattgggaaaagcggccttaatttagttgtggagggtgacacctggctccagacactctctatgctcggatttatctttttaatgtttttaagcgggcttgaaattgatttttcgtcgtttgagaaaggaaagaaaaagcagttcctgccgaatggcaaggaagcgccgaatacgtttgctgcggcatctgttattttcgtcggtatttttattttatcattgctcttgtcctatgggttcgtcttggccggatttatccaaaatgcatttttgatgaccctgattatttcaacgatttcattaggcgttgtcgttccaacattaaaagaagaacggatcatgaattcgaatatcgggcagattattttgcttgttgctgttattgctgatttggccacgatgattcttcttgctgttttttcttctttatacggagaggacagcggaaacatgtggctcctgatgattctgtttgcggccggagtggtgctttactttttcggccgggtcttcaaacatcgctcttttgttcaatccatgtcaaaagggacgatccagatcgggacgcgtgccatttttacgttaatcattgtactcgttgccctgtctgaatcacttggggcggaaaatattctcggcgctttcttagcgggggttcttgtttccctgctttcgccaaacaaagaacttgttcagcagctggattcattcggttatgggttcttaataccgattttcttcgtgatggtcggtgtgaagcttgatatttggactcttttccaggataaaacaattttaatcatgattccgctcctgctgctggcgctgttagtcagcaaaatcattcctgtcatgtacttaaagaagtggtatgataaccgaaccattttcgcgtctggtttcctgctgacatcaacgctttcgctcgtgattgccgctgcaacaatcggccagcagcttcacgtgatcagtgcaaatatgtcaggagcgctaattttagtagccgtcattgcaagtatttttacgccgatctgttttaaaaaattatacaaacgggaagagcagccggaggagaaaaagacgattacgttcattggcgccaatcaaatgactttgcctgtcacactcgaattgccagaggaagagtatgacgtgcgtgttgtacacgtctaccaagagaatgcggaggaaaagctgtcagaatcagtgtttgctgttgaaacaatttctgactatgaacacgagacgcttgaatcactcggcatttttgaaacggatatcctcgttgtggcgacaggaaatgaagatatgaatgcagacattgcattacttgcaaaagaaaaaggcacagaaagagtcattgcaagcgtaggatcaccggagcatgaagcagctctgaaggagcagggaatcagcatcttttctattctgctgtcgacaaaaacgctgcttcgcgcactgattgaagcgcctggcgtcatgaagctgctcacgaaccaagagtcttcgctgtatcaaattaatatggagaacagtaaatatgatggtgtcattttacgggaattccctttaacaggtgacgtcatctttgtcaggatcttcagaggtgtggacagcatcgttcctcatggggatacaaggctgaaacttggagaccgtttaattgtcaccggatctcgggggtacgtaacggatcttaagaaaacattggaaggataaatcttgaccaaataaggattcgtgttaatatagaggtgcagaacaattcaatatgtattcgtttaaccactaggggtgtccttcataagggctgagataaaagtgtgacttttagaccctcataacttgaacaggttcagacctgcgtagggaagtggagcggtatttgtgttattttactatgccaattccaaaccacttttccttgcgggaaagtggtttttttattttcagagggggaatgatttgtgaagttttcagaagaatgccgcagtgcagccgcagaatggtgggaggggagctttgtccatccgttcgttcaaggaatcggtgacggaactcttccgattgaccgttttaaatactacgtacttcaggattcctattatttaacgcattttgcaaaggtgcagtcatttggcgccgcttatgcgaaggatctttatacaacggggcggatggcaagtcatgcccaaggtacatatgaggcggaaatggcgcttcatcgcgagtttgccgagctgttggaaatcagcgaggaagagcgtaaggcgtttaagccgtctcctacggcgtactcttatacatcccatatgtaccgttcggttttgagcgggaatttcgcagaaatcttagcggccttgctgccatgctattggctctattacgaggttggtgagaaattgctgcattgtgatccggggcatccaatttatcagaagtggattggcacatatggcggtgattggtttagacaacaggtcgaggagcaaatcaaccgctttgatgagctggcggaaaacagcacggaggaagtgcgtgccaagatgaaagagaattttgtcatctccagctactatgaatatcaattttggggaatggcctatcgaaaagaaggctggtctgacagcggcataaaagaggtggaggaatgtggagcttcacgccataacggatgacagcaagccggtagaagagctagcgagaatcatcattacgattcagaatgaagttgattttattcatattcgggaacgttcaaaatcggcggcagatattttgaaactgctcgagcttatttttgaaggcggtatagataaacgaaaactggtgatgaacgggcgcgtggatattgcgcttttctctactattcaccgcgtgcagctgccaagcggcagcttttcaccgaagcaggtcagggccagatttccacaccttcatatcgggaggtcggtgcattcactggaggaagcggttcaagcagaaaaggaagacgcggactacgtgctgttcggccatgtgtttgaaacggattgcaaaaagggtcttgaaggcagaggagtatctttgctgtcagatatcaaacagcggatttccatcccggttatagccatcggggggatgacgccggacaggttaagcgacgtaaaacaagcaggggcagacggcatcgctgttatgtcaggaattttctcttccgctgagcccttggaagcagccagacgatattcccgcaagctaaaggagatgcgctatgaaaaggcattatgaagcagtggtgattggaggcggaattatcggttccgcgattgcttattatttggcaaaggaaaacaaaagcaccgcattgtttgaaagcggaacaatgggcggcagaacgacaagtgccgctgccggaatgctgggcgcccatgccgaatgcgaggaacgtgacgcgttttttgatttcgccatgcacagccagcgtctgtacaaaggtcttggagaagagctttatgcattatccggtgtggatatcaggcagcataacggcggtatgtttaagcttgcattttctgaagaagatgtgctgcagctgagacagatggacgatttggactctgtcagctggtattcaaaagaagaggtgttagaaaaagagccgtatgcgtctggtgacatctttggtgcatcttttattcaggatgatgtgcatgtggagccttattttgtttgcaaggcatatgtgaaagcagcaaaaatgcttggggcggagatttttgagcatacgcccgtcctgcatgtcgaacgtgacggtgaagccctgttcatcaagacccctagcgaagacgtatgggctaatcatgttgtcgttgccagcggggtgtggagcgggatgttttttaaacagctcggactgaacaatgcttttctccctgtaaaaggggagtgcctgtccgtttggaatgatgatatcccgctgacaaaaacgctttaccatgatcactgctatatcgtaccgagaaaaagcggcaaactggttgtcggcgcgacaatgaagccgggggactggagtgaaacaccggatcttggcggattggaatcggttatgaaaaaagcaaaaacgatgctgccggctatacagaatatgaaggtggatcgtttttgggcgggactccggccgggaacaaaggatggaaaaccgtacatcggcagacatcctgaggacagccgtattttatttgcggcgggccatttcagaaacgggatcctgcttgctcccgcaacgggcgctttgatcagtgatctcatcatgaataaagaggtcaaccaagactggctgcacgcattccgaattgatcgcaaggaggcggttcagatatgatgctacagctgaacggtaaagacgtgaagtgggaaaaagacacaggtacaattcaagacctgctggcgtcttatcagcttgaaaataaaattgttatcgtggaaagaaataaagaaataatcgggaaagaacgctatcacgaggttgagctttgtgatcgtgatgtcattgaaattgtccattttgtaggaggcggatgagcatgttaacaattggcggaaaatcatttcaatcaagattgctgctgggcacggggaaatacccatcgtttgacattcaaaaggaagcagtagctgtttccgagtctgatattttaacctttgctgtgcggagaatgaacatctttgaagcatctcagccgaattttctggaacagcttgatttatccaaatatacgcttttgccgaatacagcgggcgccagcagtgctgaagaagcggttcggattgcaaggctggcaaaagcgtcaggcctttgtgacatgattaaagttgaagtcatcggatgcagccgttccttgctgcctgaccctgttgagacattaaaagcgtctgaacagcttcttgaagaaggctttattgtgctcccgtacacgtcggatgacgttgtgctggcgagaaagctggaagagctcggcgttcatgccatcatgccgggtgcatctccgattggatcgggacaaggaatcttaaatcctttgaatctgtcatttattattgaacaggcgaaagtgccggtcatcgtggatgcgggaatcggctcgcctaaagatgcggcatacgcaatggagcttggagcggatggcgtactgctcaatacggctgtatcgggcgctgacgatcctgtgaaaatggctcgtgccatgaagctcgcggtggaagcaggacgcctttcttatgaggcgggccgaatcccgcttaagcaatacggaacggcaagcagtccgggagaaggtcttcctgtatgacaggcaggtattcaaggcaggagctgtttgctccgatcggcccatccggccagaaaaaattgaaagaagcgcgcgccgtgattatcggcgccggcgcgctcggaacagccagtgcagaaatgctggtgagagcgggagtcggctctgtgaaaattgccgacagagattatgttgaatggagcaacctccagcgccagcagctttatacagaagatgatgtcaaaaaagaaatgccgaaagcagccgctgcggagcgccgtctccgttcgattaacagcgatgttgatgtgaccggccttgtcatggatgtgacagcagaaaatatcttcgagctgattagggatgcatcaattatagtggatgcggctgataattttgaaacccgcctgatcgtaaatgatgctgcggtaaaggaagggattccttttctttacggtgcctgtgtagggagctacggcctcacctttaccgtggtgccgggttctactccttgcctgcattgcttactcgatgcacttccgattggcggagcaacatgtgacacagccggcatcatcagtccggctgttttgcaggtagcagtctttcaggtaacagatgcactgaagctgctgacgggagaggagtgcgagccggtgctgcgctcctttgatttgtggaaaaatgagcggtcagaagtgagagcggccagtctcaaacatgacgcatgcccaagctgcggcacaaaggattttccgtttttgtcatatgaaaatcaaacaaaagcggctgtattgtgcggcaggaacacggtgcagatcagatcatctattacgaaagaagcggatcttgaagcgcttgccggtcagctgaggcaggccgggcttgaagtagctgcgaacccgtatttaatttcctgccgctcggatgatatgaaaatggtgctgttccgggacggcagagctttgatccatggaacaaatgatattgcccgggcaaaatccatttatcataaatggatcgggtaataaaaggagtgtagtgtaatgagtatatataaagcattgacaatcgccggatcagattcaggcggcggcgcagggatacaggctgatattaaaacctttcaagagcttgaggtattcggaatgtctgcgattacagcggtaaccgctcaaaatacgcttggcgttcatggggtgcatccgctgactgtagaggcgttgagacagcaaattgacgctgttgctgaggatttgagaccggatgcagtcaaaacgggaatgctctggaatgccgacatgattgaagaagtggcaagaaaaattgacgagtacggattcaatcgtgtaattgttgatccggttatgatcgcaaagggcggggcatccttgctgcgtgatgagtcagttgccaccttaaaggagttgctcattccaagaagctacgcgattacgccgaatgtcccggaagcagaaacgctgacaggaatgacaatcagctcgctggatgaccggaaaaaagcagcggagcagctcgtcaagatgggtgcgcagcatgtcattatcaaaggcgggcaccagcctgaggacaatcacattactgaccttctttttgatggcagcatgtttatgcaaatcacccatccttatatcaatacgaagcatacgcatggcacaggctgcacctttgctgcagctttaacggcccaaacggctaaaggagacagcatccatcaggcatttgaagttgcggccaactttgtccgtgaagcggtggaaaatacgctcggcatcggatcgggacacgggccgacaaaccatttcgcttttaaacgaaacagcttaaatacaagccgatgagatcaccagctgatggtgatctcttttgcgtttgctacggtatgcgcttttcatctggacaaggttatgatatgataggaattaagatcaggtactaatactatgtctttattaaatataggaggctttatacatatgaatttttcacttgaaggccgcaacattgttgtgatgggggtagccaataaacgcagcatcgcctggggcattgcgcgttctttacatgaagcgggtgcacgtttgattttcacatacgctggtgaacgcctggagaaatccgttcacgagcttgctggaacattagaccgcaacgattccatcatcctcccttgcgatgttacaaacgacgcagaaatcgaaacttgcttcgcaagcattaaggagcaggtcggtgtaatccacggtatcgcgcattgtatcgcgtttgccaacaaggaagagcttgtcggcgaatacttaaacacaaatcgtgacggcttccttttggctcataacatcagctcatattctctgactgctgttgtcaaagcggcacgtccgatgatgactgaaggcggaagcattgtcactttgacgtaccttggcggagagcttgtgatgccaaactacaacgttatgggtgtagcaaaagcttctcttgatgcaagtgtgaaatatttagctgctgacttaggaaaagaaaatatccgcgtcaacagcatttctgccggcccgatcagaacattatctgctaaaggcatcagcgatttcaactctatcttaaaagacatcgaagagcgtgcaccgcttcgccgcacgacaacacctgaagaagtgggcgatacagctgcgttcttgttcagcgatatgtcccgcgggattacaggtgaaaatcttcacgttgattcaggtttccatatcactgcccgctaagcaggatctatttcaagcaatcccgaatagggattgcttttttatttcttctgattttcagctttctgtcatatagatagaatatgacacaatcggagggatgaagatgtctaataagaaaagaaacgcggataaaaaaccgctcatgtatattgttcagccggattatgcagaaactacaagatcatccatgcaggagattgtcatcaaaagaaaggccgacaaacccgctccgccaaaagctgaggaaaagccggtttaccatgagaagcagcaggaggaagctgtggcacaggatgtcctgcaagaagaccaaaagcctgcagccgaaccagtgagtcagcaaactcaagaggtgagagaaccagagaacataaaaagccaagaggaacagaaagcagagccgcaggccgtagaagaaaccgttgaacacgagcccccgaaagcagaaaaaaaggaagagcctgcacttgaggcccggaagcctgagaaagaaccggaagctgtccatagtgctgataaagcggaggaaaaagcaccgccggcacgaaaagtgaaaaaaccgatgagcaagatgacgatccacgaaaaaattgattttttaacaaagctgcctcataacatgccgagagcgctttgtttgattgaagccaatggaagaacgtacaggggcgtgattgtcggaagaagaaatgattccgtcctgcttcgaacaaccggaaacggagccccaaccgaactggcaatcgatgatattacctctttgcacccgctcggtttttaacgaaaaagaaaaaagctgcccggctgatgttgccggacagcttttttacatagagaaaagcctgcggcttgcaagcttttccagcttatgattaatgctgatgatgtgtacgattgattaatcgaggatttaagcagttgattgcgcagaagcagtctaagtcaacttcaatacagtagttcgttttttcgagtcggaacacttcacacaccgtatctttatcggtgaagtccaaaatgtgtttgtgttcgtcaaatgcgattaataatgacagtgttgcgcagcttccatgcactctttcgaccctgaaaaatactgtattaaagcaagggccgttatcgagttcgccgacatttccgaaggcgactaatggcgttgattttgatgtaaatattgcaaaaggcactgtgtcgcctaacgaatggcttacagataaaagcttagagtggcagccggtcgggcagtcttcttcaacagcgttttgcagatcttcaatattttctacagcttcacgcacgcagcttgatgttttctggctcatattatccctcctgccttataaatttgagactggcgaaatgatggagagtcagctgcctcacgcaggaagcagctgaatgatttgcacctgtaatagagtttggaaggggattcctctttacaagtgtttatccattgtgatgatgctttttatctttatgaggcgatgttctgtcaactagctctggtgacaggcactgaatcgcgcagaagcatccgagatccacttcaatgcagaaatctgttttttctagcccgaagaaatccgggtcgcaaggatggcaaacacttaaggtatcgcctttaacatcgacagggcgtaaaatagacagtgttgcgcagcaatcacataatttttcaacgcggaagaaaatggattcaaagcattgcatatcatccacaaatccccccacgtttccgaatgtggagaacaatccgccttttttatcaaacaagagaaacggaattgtgtctttacctgcaattgtcggattcaaaaggtttgtatagcagccagtcggacactgttcctcaactgcctcctgctctgctaaaatcttttccactgcatcgcatacacagttctcatgccggccatgggtttttccgcagctcattgatttcagctccttctttatagggtatttgactttagtccttaacaacatatgtacccgtgccccacttggtgtgggtgaacgtctatatattcatcatatgcttggaaaataagaaaaagcagagcgtttttagctctgcttttaggttctagaggacaagagtgatgactaggacagcgatcagaacgtttgtagctgtagagacaagggttgcgatatcggcatctactgttgtgacgtttacgccgcgggagcattcgataagaagtttctggcggtttacttgcttgttagctgtaagctgcaataaatcttgtgcgactaattcagcaataacgccatctgcaatggaggtgagagctactgtcaagacagctgcattaagcgctgttacaatagatgttacggcttgaacgtctgtagatgaaacgttgatgtcacaagagtctctaataataatcgtctcatctgagacttgtttgttgagatttgcctgagctagatcttggtcgataaaggcgttgttgtcattgccaaacccattgttattgcagcaaatatcgcaattgcattttctttcttctttttctttctctttgtgctctaacggatggtcacagtcaggatcaagtgcaacccaagagtatggtctgctttccatatctattcctccttttcttttactgttattaaatgagcgagcctcttactttgactgaggcatttatcttgatgatgtgccctattttttatgattaatttgaattgttattgttttgccgtctttgtctgagctgttcaatgagctgctctctgcggctaagcggtttatcgctcttttgctcttgtacggcttcttcttcttttttcttcttgtgtttttcagctagctccgctgatttcgcttgcaggtcttttaccatattcaaaagcatttctttttcttcatctgatacttttttcattttgtcttttgtgatgccgtgttttacaaatatgttttggaccagcattttcatcattggatcaacttctgggagcttttcaagctcttctttgattttatcgttatctgacatttgttctcacctcaacttttagtttgtgaaaagaaagggttaaaggatgtcgaattcaagtagcatactgtttaacacctgaagcaagatttgtacaaaggttattatttcgtctgcagacaaagtaatcttgatgtttcggctgttgataattttaatgatggttctttttttgatttgagagttatcgagaatgagtatttcgcttgctactgtgtcggccaagtcctcgtcggcaataacgagctgtgtcagcaggataatcaatgttgtaaccaaggcttgtatagaaagggcagatgttatatgtgacgtatctattgtgatattttcgcaatcaatcacttcgatctgctgctcgaattcgcttgataattgctcaaatatgtcaggatgcagggattcaatttttgtttcaaatgacataaccttcactcctttcttatccatactctatataatgcaaatggggtgcagagcggaataataaaaataaccaattttctgccggacaagatacaattcatgaagaatagggttttcgcatatatgtgaagggatcatgattggcaaaggagtgaacgagtggttataaatgggctgacaattgttcttctatcgcttgcggtctttcggctcgcccgcctgctggtgtttgacacgattatggcgccgcttcgcagtctgtttcatgaagagaaggaagaaaaggatgcggacgggaatattcaaacctatatcgtgattaaaggaaccggtgtcagggcgtttattggtgaattgctgagctgctattggtgcacaggcgtgtggtgcgccggctttttgattttatgccaggcgttgatcccgcaagcggcgcagtggctgattttacttttggcgatcgccggccttgccggcatcatagaaacgctcgtatcaaaatggctgcaagaatgaggcgttaccaccagcaacttttcactagcatcagcataaagtagcatatatgacataaggaaaggaagggaacaaaatgaatcaattcaataaaccttcccaaaaatctccatatacagattcgtcgtatcaatcaaaaaagataaaaaagaaaggctgcgggtgcggaaataaaaagaaaaagcctcaatagcctggcaaagaaaccggagaactccggttttttgttttttaacggagcggcctcgctcagcatatatcataagcggggggataaaagtgaatgagtttgaaaaatggatagaaggaagatatgaaccacacgaacaaaagcaaaaagagtatgaagacacgatgggccgtatcagaaaagacttggatgcatttgataaagccggtctggaatttgaagatgagattgaagagctggctgaaaaaacggaggccttacttaaaaaacatcaagctcaatatgatcaatcgtaaatccgcaaacgccctatgcgaatatccaagccgatccaatcagctcacatagtgtatagagagtaaaggaggtgcttatctatgggctttggatacggattcggcggcggctacggcggcggctgttatggcggttatgctggcggttacggcggcggctatggttcaacatttgttttgttggtcgtattattcattctcctcatcatcgtaggtgcatctttcttttaagatgtattgaggaagtacgggttataacccgtgcttccttgccttgtgtttatttttaaaaatgttggaaaagcacattgtattatgtgcattcatacaataccgtattactccgccaaaaggaggcgcattatggataatcaattttttaagaacatcgaaaagaaaacaggtgtgaagatgcaggatgtaatgaatcttgccggatcactccaaaacgctaattttaaagatgaaaatacagtgcgcagtgtgattaaccgcgtagctcagatggcaaacagacgcgtgccaaaagaattagaagataaaattgtggaatctattacaagcggaaaagaaaagcttgattttggcacgatttctaaaatgatggataataaataagtggatggcctggctgactcactgcagcgggcctttttttacagtaaaaacccggcagtaatctgccggactgttaatgatgcaagggctgtcttgctttttgtagaaggggatacaaaaatcttgagcggttggctgttttgccgcgcctgttagcggggcaagacaaatataaatgctgtttcgcccgggtcatggctacatataaaagacgtctttcctcctcaagagcggcctcgtctccttttcttgccgtttctaatgagaaatcgtgcggaatcgagccgtctacagtgcctaacacgtagactgttttgaattcaaggccttttgaccggtgaatggtcatcagctgaacgccatgttcatccgttctgtttttctcagcggccctcatatggtctacgtgggcaagaaagtcaggaatcgttttgaacttcttggcgacaaccttgatgtcgcgcaggtcatcggaacctttttccagcttgttgccctcattgccccgcttttttaaatactcggagaagcccatttttccttctgcaaaggtgatggcttctacgggcttcatcgtgcggaggcttgcaaaaaacggtacgattttcttgattttgtccagctggaatggcttcagatcaggcaatttggccagcgctttgatcatggtacagtcctctgtaatcgagagcgccttcagcgtattcaaagcggactgttttaaaaacaaggcgggaagcaagtgtttaatcgcctcggtgtcatcctcattttggctggcatacaagtaggcgagaatctggcggacgatccgtctgctgtaaaacgattggacgccgcggtcagctgtatacggaattgatgattgatgaagcctttcataaatagcacggcctccgctgtttgtgcggtacagaaccgcaaagtcttctggactggctccattttgaattttttctttgatatcggaaacgaccattgtggcttcttcctcttcatcataaggataaaacagcacagggacctgaatgtcatcgcgggccgcttcaagcgttttggcatatctgtttttgttctttttcacaacgatatcagcactagagacgatcgggtgcgtagacctgtagttcgcagttaaatagatcgtcttcgctcccggataatccttttgaaaatcaagaatgaaagacggattgcttccgcgaaacgcgtagatggactggtcatcgtctccgacacagcacaggttttgctccggactggcgagcatttgcatgattttgtattgaaccggattaatgtcctgaaactcatcaattaagatatacgtaaaccgagattgatattgttccagaaggtcaggccgctcgataaacaattcatagcaggctgaagccatgtcatcaaaatcaaattggctgtgttcttttttctggcgttcataatgttcatataaacgataaacttgtttttcccactcatcttttagagggatgcgttcatttgggacataagtgtttttccaaaaaccgatctgctgcagagcttggtcaactgggaattctttctcatcgatgccttcttcatagagtgcttttttgatatattgttcccgctgccactccattttcagcagatgctcaccgttccatttagcagaattagagtgatacaagatcttataaaacagactgtggaatgttcctgtcacaagtcttctgacttttgccggctgtaatccgtactggttggccatacgctctttcatttcagcgacagcttttgttgtaaaggtgacaagcagcatattttcaggcggtatgcctaagtgttcgatcatgtgggcggcacgggctgtcagcacccgtgtttttccgctccccgcacctgcaagcacgagcagcgggccctctgtttccgtgacagctttcagctgatccgtgtttaaaccgacagacggaaaaaggctcgtatcgggttctattgtttttggcacaaatggtgttcctggtttaatgcttctaggacggtgccattccgtaacagctggggacgggtcagcggcgatcgcttttcccttgggtaaacgaatgacaccagattcctgatcgtcttcttttttttcctctttagagggcttcggttcgcacgcctcctcacatgccggaaaatcgcctggctggcgatggataaactctggcggatcggcgatgttaagccgtaacaaaacgggctttccgcaatgagaacaaaataaatgtccttttattccctcttcaaagaggaattgataatgttctctcgaatatgtatgtaaatgtatgattctatcattcagtcgggcgcatttcaaaaaggggtcctcccaatcaaaaggtgttcattacagacaatgactatcatatcaaaagaaatgtgtttcaaaaagtaagtttaagggaaaagagacagcagaggggtgggtattgtatgatatatgcaggtcaaattcagaaccagcaatacgctcaatatgctaatagaacgattggacataagcaggattatgccggaaccgaaaaaatcagctatgtcccgtttcagcgggtatacaaagaactggaaaagcagcaggagaatcaaacggcagctgaaagaaaagtaaacgagatgaaacgtaagcgctctctttataagagattgcgagaaaaaggaatgggcacatatattaatcgatatgtataaaaaaccgttcataccagagaacggtttttttatatgcagtaaaaatccggatctcaaaagatccggatgcgttcagtccttcatcatttgtaagtgcggaatgccggcatcgaggaattctttttcagaaagcacgcgatacccgtgtttcttgtaaaacggcacagcctgtgtttgcgcgtttaaaatgaaaccggaagcgcctccgtctgccgcggctttttcgagcgctttcataatgatgccgccgacaccggctgagcggtggcttttcagtacgcaaatccgctctaacttgccgtagccgtccttcatgcgccatcttccggcaccgacaggcttttcaccgtcatacacgatgatatgctctgactcattttcaagttcgtcaatttcttcttcagcaggcacgttttgttctttgacaaagacttcttctcttacatagaatgcatctttcagttgttcttcattttttgcgataactgctttcaaacattattctcctctgcctagcaagaaggtttcatatactgtccacgatccgttttccagctggtaaagcaagtggaaacggtcaacgatttcttcatgcgacacttcctgcatttttaattgtcccagcacatctgaatgctcatcgtcggagagattttggccgaccgtcacatgcggaacgaaattatattcctgttctcctgccaacacaccggtgtatagcttttcattgagtgtttttaactcttccgtcggttctgctttgatgtaaatgacattattgacaggcgcaaatgagctgtattttgtcattttgagaacgagtgggtgggactcttttgcgatgtttcttaaatgtgatacgagctgatccgctttctcctccgcgcattcaaaggatgctctcagcgtcaaatgaggcgggattagagagtagcttgggtcatagcgctttctgtaagagtttgcaaggtcttggagcttttttgatggaaataaaacgattccgtatttcatattatgtccctcctggaaataaagtatgatagagtgttaaagcatttttttcagcgccggggtgatgagcggctgccagtatgtccatttgtggtctccgtcaaatggctcgaaatcataatcggaaagctttttctccagcagctgtttcagctcccggttcggttctgtaaagtccagaatgttcccgtctgtcgtgtggacgtcagtttcttttgttccgatttggtgataaatagagaggtgtttgatatcgtctgactgttttacggcttctagtacgtgtttgtcaacatagggagactgcatgatgatgttgccaaacatattcggataatcaagcgctgtcataagtgacacggttgctccgagcgaatcacctatcagcgttcggccgtaaccgatctgataggttggatactcatcatctgcaaaaggaacgagctcatgggcgatgaaccgtttataagccgaaaattttgaaccctccggatgataggtgtttctgcgctcttttacatccttataaggaacaccgataataatgctccggtctatttcgcgtttcgacagcaattcctcaacctgtctgccgattctccccagcctgaaataatcgtggccgtcctgcgcgataatgacatggtatttataaagcggggagtagttggacggcagataaacaagcaaggtcatttcctcgttaagctcttttgaaaagaatttcttttcttgcactgtgccgtttttcggtgccataaaaacattcctccaggacatcactatactttcttgcattttcaattattgtaccatgaattattagaaatttctctctttaaacggttcggcacacgaagaaaaaagtgttgaaataaactgtgaattgcgctaatataaaacaatcagaaaattgaaatcgatatttcttatcgtgagaggtggagggactggcccttagaaacctcagcaaccggcttgttttgcatgtgcaaagcgccaaggtgctaaatccagcaagcgttttttatgcttggaagataagaagaagcgttaaaccccttcttcttatgaagaaggggtttttattttgaaaagggaaggtgtcagctatatgtcacagcacgttgaaacgaaattagcccaaattgggaaccgtagcgatgaagtcacgggaacagtgagtgctcctatctatttatcaacagcataccgccacagagggatcggagaatctaccggatttgattatgtccgcacaaaaaatccgacacgccagcttgttgaggacgccatcgctaacttagaaaacggcgcgagagggcttgcctttagttcgggaatggctgctatccaaacgattatggcgctgtttaaaagcggagatgaactgatcgtttcatcggacctatatggcggcacgtaccgtttatttgaaaatgaatggaaaaaatacggattgacttttcattatgatgatttcagcgatgaggactgtttacgctctaagattacgccgaatacaaaagcggtgtttgtggaaacgccgacaaaccccctcatgcaggaggcggacattgaacatattgcccggatgacaaaggagcacggtcttctgctgatcgtagataatacattttatacaccggtcttgcagcggccgcttgagctgggagctgacattgtcattcacagcgcaaccaagtatttaggcgggcataacgatctgcttgctggacttgtcgtggtgaaggatgagcggctcggagaggaaatgtttcagcatcaaaatgcgatcggcgccgtcctgccgccatttgattcgtggcttctgatgagaggaatgaagacgctgagcctcagaatgcgtcagcatcaggcaaacgcgcaggagcttgcggcgtttttagaagagcaggaagaaatttcggatgtgctgtatcccggaaaaggcggcatgctgtccttccgtctgcaaaaagaagaatgggttaatccgtttttaaaagcactgaagaccatttgttttgcagaaagcctcggcggggtggaaagctttattacataccctgcgacccagacgcacatggatattcctgaagagatccgcatcgcaaacggggtgtgcaatcggttgctgcgcttttctgtcggtattgaacatgcggaagatttaaaagaggatctaaaacaggcattatgtcaggtcaaagagggagctgtttcatttgagtaaacacaattggacgctggaaacccagctcgtgcacaatccatttaaaacagacggcggaaccggggcggtcagtgtaccgattcagcacgcctcgacttttcaccaatcttcatttgaagagttcggggcatatgattacagccgctctggcacgccgacaagaacagctctcgaagaaacaattgccgcattggaaggcggaacaagaggatttgctttcagttcaggcatggctgctatctcaacagcatttttactgctgtcacagggtgatcacgttcttgtgacagaagatgtatacggcggaaccttccgtatggtgacagaggtgctgacccggtttggcattgagcatacgtttgtcgacatgacggatcgtaatgaagtggcgcggagcatcaagccgaacacaaaggtcatttatatggagacgccatcaaatccgacacttgggattacggatattaaagcagttgttcagcttgcaaaagaaaacggctgcctgacctttctggacaatacattcatgacaccggcactgcaacgtccgcttgatctcggcgtggatattgtacttcacagcgcgacaaaattcttaagcggacacagcgatgtactctcaggtttagctgctgtcaaggatgaagagcttgggaagcagctgtataagctgcaaaacgcgttcggcgccgtccttggcgtgcaagattgctggctcgtgctgcgcggcttaaaaacgttgcaggtccgtttagagaaagcgagccaaacagcgcagcggcttgcggaatttttccagaagcatccggcggtgaagcgcgtgtattatccgggactggctgatcatcccggcgctgaaacccataaaagccagtcaacgggagcgggcgccgtactatcttttgagcttgaaagcaaagaggccgttaagaagttagtcgagaatgtgtcacttccagtcttcgctgtcagccttggcgccgtggaatcgattttgtcctatccggcaacgatgtctcacgcggcaatgcctaaggaagagcgtgaaaaacgcggtatcactgatggcctgctccgtctgagtgtgggcgtcgaacatgcagacgatttagaacacgatttcgaacaagcgctgaaagaaattgctccagttgcggttcgttaaaaaagaagccggggatggcccggcttcttttattattgttcgtcatcaggattcagaatcgcgaggacttgatgatcctcccaaacgccattaatttttacattttttcgggcgatgccttctttatgaaatcccgctttttctaaaacacgcatggacccgagattacggggcatcacaccggcttcaatccgatgcagtttcaattcgtggaacgcataatcaacaaccaatctgactgcctctgtcataatgccctttccattatgggctttgtctaaaaaatacccgatgaacgcagtttgcagcgcgccacggatgatttgaaagagcgaaaccgtcccgattaatctatcgtctgacgctgtaaagatgccaaaatgatattcttcatctttctcaagtctttcctgatactcggttattcgttttctttgcccctcaaccgtatagtaatcgtctgcgcgtatcatagaaaactgttcgaaaaaatcccgattttcgctttgcagccgcaaattttcttcggcatccgttacttctaaaggtctaacataaatggtttttccttttaacatacagtgatctctccgttctcatgtcagcattcctcttacattattctcagggaaatgcaaatatcctttttataagaaggaagaaaaccaatttcccataaaagtgccaacatagttgccgattaagtagccgagcgtaccgacaagcatgatcggggcaacaagctcccgccatcccttggcaattgccatcgcagccgcagtcgtcggtcccccgacagtagcgttgacggcgagcagaatttcttcaagctgcacacggaacaattttccggcagctaaggaaaccgctaaattgctgatcgcaatgataaacacgaataatagaataagaggcgcattcgtgacgattaaacggagatctgcaggaatgccgatcaccacaaaaaacaaataaatcaaaaaggttccaagttcctgagatccattgagcctttcaaaaaaacgtgggaaaagaaaaatgataagaacagttaaagacgtaagcaccaggtactgatcaccaagcgtaccggtcagcaggggatgagaaaaaatgcttttaaaataaccagaaaccttcatacttaccgcaacaagtgcgaaagcagcaccggcattaaaagctatatcctttaaggaaatatccttccgtttccaatagctttcagcactgtttccgctgtttccatcggcttttaccttctcttcaaacggcatggcataatgccgctgaaaccatttgagtgcaggaatgctgattaaaataaaaaacaaaagcgccatcataaaattatcagccacaacggtagccgacacatattcaccaggcgtctcaaattttgccgccatcgccgcaaagttgaccccgccgccgatataagaggcgctgatcatcccgccgattttatcgagatagggaatatgctgtttaagtagaaaaaaagcaagaatgctcccaagcacagtgccagcggagctaatcagaaaaataaacagcaaacgcctgctttccttaaaaatttgccgaacattgatctgaaacaataaaagtggtatcgccagcggcaccacataagaccacacagtatcatacacaggcgactcaacaggaagcactcctacatttgtaaacaccatagcacctgccagcgcgataatagcacccgacacagcggacgcccacttaaagcgctgctccagcccgatgctcactgccgcccacaccgcaataaacccccacaatacccatacatcatcagaagaaatcaaagaatgcaaaatcccatcacccctattgttagaaaattaagacatattataatagccggggaacggaacagcaagtccaaaaaaagtttttctaaaaaagcagttgacgaatagaagggaaggttatataatagaacttgtcagaaagacaataacatacccagcaacacatacatatcatgattccgtagctcagctgggagagcgctaccttgacagggtagaggtcgctggttcgagcccagtcggaatcatagcttaaacccttgcgcagcaagggttttttattttgcttatttattgattttgtctcattcatcgaattggggacgaaattatttttttgagctgattttgacgaagaatctcaaaatcaactctgtttttgtgctaggtttctaggatcgaactggttaaagtgttttactgtgctattttcgagtttctcggtaacgtggccataaatatcactagttgttcgagcactggcatgtccagctcttctttggatagcaactgagactttcgccagcttccataaggagagccaccatagtatgccgcaagtcatgaagacgaacatcttttaggccgtacttcttttttaattttagtccattttgcggtaggggttgtatagtagtaaggttttcctttaccactgtgaaatacaaattgatgttctccgccttcccaggcatcgccaagcaacaatttttccacttgttgcctaaaaagacaatcaaacgcttaagtaattatatcttcaatatccaattatctattctatcgcctctttccatattaaaatcaactctaaaaactcatcagtttctataatactttcaaaaggctcatcaacccggtaatgatgttcagctattgtcttgtttttcttaattattatacttgtagcattcaacgtaatttcaaagtcttcataatctcctgttaaaaccttcttaacgtatccaatatactcgtctgcttcctcttttgttgaaatatcctcaaaaacgtccgagaaaatagttaatttttccggtagtattattcttgtgataccaaatggatctttttttaattgatatgtatatctcatcttgtttatcaccttctatgttatttattatacaaaggataagcagtggctattgtaccatccttgtttaagaacatttctattttaattcctgttgaattttcacctataaacttattagcacctatcttttttttattttgatacgcttcatcaatagcctttaacacatctacacgattccattcctttggaaaaaaactagatttggctatttttctcttcccgcttatttcaacattggcttcataaacaccatttttatcaggtgttttctcggaaccaggtataatttttccacccatcatactttcatgatgatatccaactgctttaccgcgtctattaatttcaccatggtaaatgtgtttcatcgttcccgtattatatttacccgtatccttattgttagaacgttcagatcttctgagaacactctcttttttattttcaatcatactttttaggagaggagtattttttgcgttatacgtattctcgatgtcttgtgcaatcccaaccagtgcaagatcattcttatttctaataatagaattgatgtaagatttgcctttgtttattcctttattgacatgagcagcggctgttccaccttcaaccactttacctactttagaaagcttggtagtggtttgcaccgcggcacccgcaccttttggaccaacgatatttccgatcacataactgatataatgacctttttcatatgcatcaccatttaccattttatcattccatgaatcggcgaggtttgtccagatgatttttgaataagaaggtacgctcaaaatggttgtaattgtttttgtcagtttcagttcgatagggagctgtgaatattcccatgcgcccacagctaagtctttgatgccatatatggtatcgtcaatcacatcgtcaataccatcatcaactccctcaacgaaatcaattactgtcttgctggcattgattatacttttaccgacggccttcagctgttttgcttgttcaagctgcactgcgtattggagctgttcaggggtaagattctcatagccgaccttcttggcaatgtctaagtattcatctggatccgtcactccgtcagctagcttctttttcagctctttgatttctcgttctttcgcttcatctttcttgatcttcaaataagcttcagtctgtttctcgatatcgccttttttcttatgtatgtcactttcacggtacgccttggcgttgtagtgaatgggcgtagcgtttttcccttttcctgtggattcctcaagcttttgaaagtccttcttgatgaattgctcgtttggctctgattgggcatattcagtaacaagtgcttcgtccacgctgcctagtttatcgactgtttttttgcgtttgtcctctgcatctgcaagttcgtctttaaagtcttctgtcgagaacaaatcaagtgggaggatgtcatcgatatcatgtaagatatctttcaacgctttcttttgttcagacattatggattttgattttgtgtaggcgttagccagttcgtgttctaagaaggattcttctatatatgcatcagacaagctggcgtcctctaaagtgcctgaaatgcttgttaagaaagcaattttcatatcaagtaagtcaatccaattgtcagctacacctgcgtggtcttgataaaatgctttaatgttgtcggcgcctttgccggaaaactcactgtcatctaaatcagctacagctttaaaggctttctttagattgaccatctgacttcttaattctttgtattcctttgcacgtttatctgcttctgaaagcagtgatttggcttcaaatactttcatgttcatatcctttcgtttgaatagctccaacaagattttaccatgggaaaatgaagaaatagacagcgatgtgattcaaaagtgtgaaatgaataatttgatctgtgtcaatttacctatttggattatttgtttggaaactgatgacgcagtaagacgattccagctgatgaatggtttaaatcctgatggcatttatggtcctaagactaaagctaaactcgaatctcttcttaaataaaaatagccctcctcaattggagggctatttttatttaatagaaacgtgatgtgtgtaccagtttccggttgcagtgaatcgtaattccatatggccgtggcggttacctccatactttacaaacgtgtaatcagaattggcgattgcatccttagccgttttatcaatgtttgcaattttcttggaagtgattttaccattccagccagcaaaacctgaagcggatgcacttggcgggctttcccactttgttattttctttccatactcgtatgaatagttgtcacttactcgaatatcatataattttatccctgtaaactttacagcgtaatagccacttgcagttttattttgggtggcctgtgtttttatcttttccattcccatatctgtacttacgcccatttccacagtgaaaccattaccgagatcaatttcttgatatggatgatctttgctgacatgcatactgtttaaagccttattcacttcttttacagttgggattttctcagatgaaagggttctcaagtttttttgttttgttatctcgtgaaaggtcgccttatcaataatcagatcagaattcttgtccactttttcaacagcatctgcactttgaagactaaacagagatgaaaaactcaaagctagggcaaaaaccacacccacaagtaactttttcattttatccctccttaatgttttcgtccccatcttatcttaatgtataatattggtaaatgagacgaaagtaacaaatgatgctattgattaaagtattaggctttgaaggaacgggaagatcgaaaagtaaatgaatggttttacccatttaaacaaccatatatcaggtgtatattggattgtaggggagggatatcatggtcaagatcatattggcatttgtttatctatttggcttcgttgtgttgagcaattgggctttcgacggaatattttcagagagctatttctcgccaatcggtttcctttggtctatcttatttacatttttcataggggtttataccggcttgcctttaatctacaaaaagtttactcaatcaagccgtttgactttgaaaagtaaaaagccaatttatttcactatcggtacagctgttattctctttgggctttattttctcaaaaacgaaatcgccccctatttgatgctatgtggctattttttaactctggcatcaggtatagccctgaccatcttattacagcccaaaaccaacaactgtaaaacagtataactaacaagaactaatgaaagcccgtctcaaggcgggctctatatcaaaagaaagggaatttttttgtgatatctatttacaatggtcaatagatattgtataattaaggtatagaaaggaggtgctgaagtggacgaggtaagaaactggattcttgctatcgctggtatcgtgaccatcattaaacacatctacgacatatggcagaaggaaagcgaaaagcatagcaagaaaaagaaaaagcgctcccgccgggtaagcaagaagcgctgatacacagtgagcaaaggggagtaaatccccttgctcataccattatatcacgtccacgataatatgaaaaaatattttaagcagtacaacacagcagattttgccgttttgcttatattggttgccgggatcgtcgcaattgatttgaccgatgagggtatgtctggaaagattgcgcatactgtattgatgatagccgttgttattaccttgttaaaaggattcattatgatgtggagagaaagccgacatgaaagaaagcgaaaaaattaagtttatccaggaagaagttttgactgcagcggaagcgggggagttgcttggaatcactcggcagcgattaagcacccttgtgacttcaggaaagctcaaaccggttaaaaaggttgggacagttgcattgtttttgcttggacatgtacaagcccttaaaaaagaattagaagcaggccggaagaagtaccggccgtatgatgagtgaatcccttctcaagatgagaatgattacttgtcctacttttgccacttaataatgagtggtaaattttatcaatttttgatatcctgtaattaatcataattgcgggggttcattatgaatgtatctgaattagttatttttccagatttattaaagttaccaaaaagcgatttggaggacatttgcaccaacgaaggtattgcggaatctggaggggcttttgaactagcgaaaagaatatgggattatgctgatacgtcagaaaaaaaaacaaagaatgtttacaccgtattgtcacaaattttttgctggtaatacgtcaatttcttggtacacttgtgatagccttgaagatttaagtaaatatattattgaaaaagaaaggcacaatccatttgaaacaaaaattccgtatgaagaggcaaagctaaatacgactccaaagttaagaagtgcatctagaataaacgagcattcatattttttaaggtttatatataaagatggtactcgtaggattataggtgaagatatagaggttttaccgacaaataaaacggctacagcttttatagatgaactaaacggaattatagaagttagagctaaaccaaatgatgctgaaaaaatagcagaggtaattgctgggtatgcaaggcagcaactgtctttacacaagcaaaactttattaaacctttcgggggtagtatagaaagtatagcggataccctaggtggtaaactttacgagtccaaagcaagtcctgagttatggatggacaactttggggaagaagaaaatgaagcattgcttgatatttttgaagctttaagtaaatactttgagaacggagatatagataaacttcaagaatgtttagataatgctaaagagattttgggtggggagctacttagtttaccttttgctgtacttgtacttgctggtatggggaatgtaggtttaaaagttgaacaaaaagatttaaggaacactactttatacaaagtatttaaaccctacttacaaacctcgggtggatatattaaatttgaagttgaggaaaatggtgttcagcacgagttttcaatggttgttggagttgaaagccagagcatctattttcgctctaaaaagactacagaaactgtaataaaaaaggtaagagaaaaacttttattgcaaaaattagttgtgtaaatatttgaaagagggtgatcttatgggtataaattggaaacaaaaatcagaaattgacgaagtgattaaagaaatcgcttgttcaagagtaattagattttatccaacatatattagtaagatcactttaattaatttagatactgtttttgaatatttattggagttggtagatgacggatctctaaatatattgtgggaaataagatgtcctgactttgattgtaactctgtaattttgcgaacacataatttatcagaaataatgggtaaagaaatagaatgtgattattgtgaaaatggtctattagtcagaagacaacatgtattccctgtttttgaaataaatgatgactttagagaatttttaaaacaaagtaaaaaaaaacaagtgaattatctacacgctctataagttcaccaattctccaagaaaaagcattaatttctttagaagacattaatttattactagaagaccgaactaaaaaagaattgaatgaaaaatctggagtgaatatatataattttttatacgttgagggtgattatgtggagaagaaacaatctttgggtagcgtaaaaattggcggaaatgtagggaattttgcaatccaaaatgaaaacacaacacaaactaatggtaataatgaagtaagcagagcatttgatgaaatttttgaacgaataaagggaatcgagaacgatgttcaaagggaacaggccatttttaatgctgaaatattaaggaatgcagttgaagagaacgatgtagataaaggaaaaagagtattagaatttttaagaaattcaattgggacaattggatcgttaacgaccattgctaagttctttggtattactatataaataaggcccaaaagggctttttttatattatccactttttctgttgcttcttcaattcacctttcatcaaaaggctttttacagctatacgaatatcctcttcactctttcctgttttccttttcaaatcgtccagagttggattctttccatacaaatgcatattcactatgatctgatatactttccgttcaaaatcagtcatttgatcatctcctagaaggatgataatcgaacgtatgttcccttgtaaataagttggatttggggacagatggggacgaattggggaccaacttgttcatttttagtcaaaacagaagattttttatcagaaatacttgtcagaaaaccccataaaataagatttcgaaataaaacatccgttcgtgtcagaacataatcactaccttgacagggtagaggtcgctggttcgagcccagtcggaatcatagcttaaacccttgcgcagcaagggttttttattttgcgttaataaagccggttcgtcaaattcgtgagttgttggcgaactgttggcgaaattcattgaccgcagtccaaaaactacctccaaacttacttgattagttcaatagtaacaaacggaagatcggatttctgttaaatcttcattgagaatagccagtccaagaccgtcacttcagccatgcatcttttaaatgaaattttgtactgaaaacatcaattgtatttttaaattctgctctagaatcagcccctttataataatcttgataaattgcttggggtgatactgattcgtgatttgtgctatggtttgcaaggcttgtagcaaaagcaggagcaacagaaacgagtaaagcaagggataatgcagaaccagttaaagctgttttcaatttcattttaagcacttccttttttaaaatacaactttattattaaatggaatacaaaaatatccaaggtgttttttgttagtaagttgagttagggggattggatggcacttagaatattgtttctgctgatgggatgttgattctggatatatttccaacacgattacaggccggacatgaaagcgaaccttgctttgatcggggcaatcatttcatttaaagctgcggtttactttaaagatattgatgtattgagagaagaggaaaacaaatgaacggaatttctgagcgttggaacgcgtttaaattacaaaaatcccctgaaccactctagatcaggggattgctttcccaacagcttattaagtagcggaaggcatgatcaacgatttagtatcaatttattaattgcgaatactagaaacataccgttttccgccttccttagaagtaacatattcccgaggaacgttaagtctattggtagaatgataacttacataaagtttcatatttgctcggctcgttacgatagccgtatgatccatccaaccatcagcatagcgaagacctattttattatggtaatcatagtgatatacatctccaagctttacatttgaatatgtatcagaaacagtcttcatttttattccgccagcttttaaaatgtatgatctaaaggctcctgcattaacccaagcatctgtatagggtttccattctttaaagtacggcattcttccagctcttaatgcttgggaaacaaagttagtacaatctttgtctttataatatttatagtttttatttggttttaaggcatatttttctgcatatttcattgcagcgtaaccactatatcctttaacagatgttgcagtcacagttagttgattagagttagcagcattgaagttcatacttactggtttatcttcacttttcacttcttctttatcatcatttttcacttcttgcttataattttttaaaaattcatctaatttaacatccgaagaatattcttcatcattttcatattgtagagttgaagaagaattatttaattgtgttacatttagttgcttagaagaattactcaatggtattacatttagttgattagaagaatttttaacttgagagaaacttagattagaagtatttgttgattgagaactttgtttattagaagttgttttgggaatttcaagtttaatattatcgcccagagatgttgttactttttcaacaccaaaaacaaagtttcgagtaatataagcttcaacaattagcttattgtttttttcagaagtcttaacatcgtctatatcgtatgtaaactcgtggaatttttgtttgtccactttacttaacgcagaatacagtaagactccttcgtcggaatcagtcaatttagactctttaggatgcgctaaaggagtgttgtgttcaaaatcatatttctgttgttctaacatatccttaactttttcgtaaccaatctcgttggtaattgaaacattttctttagtctctttattagtagtggctgcaaaaacttcatttgttgacactaatggtgacaatgatagacataaaactagtgaagaaagtaattcttttttcatacgaaacctccaataaaatctaaatataagtaatatttatcatttacaccaattgaaatatggcataaaatacatgtaataatataacataaaaataaatacataaaaaggtatcggaggaaaaaatgaaaaagaaaactaaaattatactttctctcttgacagcacttattgttatattgatagtacttccagttctatctcctgttgtctttacagcttcttcggaaaaaggagcaatcagacacgaaatttataaaagaggatatccctaccaaagctactttgcagttctccagaaaagagaaggagacaatgaatctgggaatctttattatgtaaattggctagattggaaagatgaaacagggcaaactcctcacttatgctattcgaaaaaagcatcagatggtgaatacgaagtaagttgtggcacagggccgtaaaaataaattttaaaattgaataagtccaagacggaaagcctgcagacactgatcgttttacagagaaatttgtgcttcgatcggtgtccgtttttttttcgcaactaaccatatgtctatcgcgattactagctatgaaaggagtaattagacatgaaacagtccaaaaagaaaccatcatagaagcaacatgagcgcttagatcgtttctggcaacaaatgatgaacactaacatgcaaacactcagacgtggcaaaggcggcgcaccacagaagaatcaaaacgctgtgactcacggctttttctctaaattcctgccagaagaaacgcttgagatcatggaagagattcaggagcgttcgcctgctgatatgatatgggatcagatacagattcagtatgcagctattatccgggcgcaaaagatcatgttcgtttctgataaggaagaaatgatcaaagagctgaaaaagaaaaggtccctcatatctgaggtcagcgaaattgaagatgggcttgtcatttgttttagtacgtggtttcgctacagactttacagtgaaactataccaaacatatttcacaaacttgataaaataacttttaaaccttcctataaaatgaaggttttttatttgatttcaatttttaaatcctttacatacagcgattgattaactcgagcaatcaatgtcgcagttatatttatttttcaagaaaatgttataatgaaaagccataaaatgataggagggggaatttcgatgcattacataacggcatgtttaaaaatcatcagtgataaagaccttaatgagataatgaaggaattcaaaaaacttgaggaagaaacgaacaaagaagagggttgtattacattccatgcttatccgcttgagccatcagaacgtaaaataatgctttgggagatttgggaaaacgaagaagctgtgaaaacccatttcacgaaaaaacacacaatagacgttcaaaaacaagaattaacggaagtagaatggttaatgaaaagcaatgtgaatgattgaaaggctctttaaaaaaaagacattcaatgacttagaatcagccacttgtgattaagtagtaaattgttgtccaactcttatttttttctatttaatattttttgagacgaaaatgttttttaaagctgattttaaaatgtattcaaagtcagctctgtttgatttaatggattatattctttggataacttgttaccatcataatggagatactccgtataaattggaggttaaaataatgagtcattctcaagaaaaaattgcactaattacaggagcaagcagtcaaggggatattggtacggctatttgtcgtaagttagcctcacagggtatacatatcttctttactcactggaattctgatgcggcctggatagaagaatttcaacaagaaattttacgtatgggtgtccgctgtgaggcaatgaaaattgatttatcagatgcacatgctgcattcacaatacatgaaaaaatttcagataaattaggatatccttccatccttattaataatgcagctcattccgcaagtgataattatgtatcgttagatgctaaatcacttgatgagcattatgcggttaatatgagatcgaattttcttctttgtgttgaattcgcccgtcggtttaaaaaatctaatttaatatcaggaagaatcatcaatatgacatcagggcaggatttaggtcctttgcctggagagttagcgtatgcagcaactaaaggagctatttctgcatttactaggtcgttatcacaagaacttgcaccattgggcatcactgttaacgccgtaaacccaggtccaacagattctacatggatgacagatgaaataagaaattttctttcacctaaatttccaatggggcgtattggcacaccagatgatgcagcacgaatgattgcttttcttgcaagtgatgaggctgaatggataactggacaaattattcattcagaaggtggatttattcggggctaagctactgaaacacaatatacaccaatgtatgatgtattcccaaaactaaatctaaacttgaagcgaaaataaggtcccttctctttttagagggggaccttattttattcatgcatgttttgcatccagaaaatctggcggataaagattaataaaccgttacatatacttttccgaatactgcagtacctttaaacaaagtaatcgtggcttttccttttgatttagccgtcactaaaccattttgatcgacttcagcaactttttggttatcagtccaataacgagtagctgaattatttttaacagaataggtttctccaacttttagaggtaaatcatagtcttgaattttgataacatgtgtaggtgaaatagaaatgttctttacctcagtaggtgtggagtttatttcatgagctgaagctaccccgctgaccgacagagctaacgcagaaatcgataaagcagaaacaacagtttttttgaaattcattttgaaacactcctttaaagttttttgtcttgcactataacaattcaataaaagtaattattttccttgtaaataaatgttaataatatgtgaacgatcaatttatttgagctaagaatattgtgtgccctgcacagagtttgtatttatgatggaaaattgctgagagagaatggccatccttaaaatgttaatagcacacatttgatgggtactagtttgttgagcgtgtgggaattttgttacctgcactttatccccgaagataccaaatcatttttcttcatcatgttcttactttcgtactcatacattagaaaatcttcgttctaaataggtgaagaacattggagtatttttatgaatttctgctgaataacgataaaaaatacattacatagcaaactcaaagaatataaaaatcgcttttttccggatgtttcggtaaaaaacgaaacttttgtctctatgattttattttataatgtaaacggtttcttatatagtatacttatactatcaatttgctcaagtagatactgacaggaaggatagaaaaacagatggaatacataaatacaagacaaaaagagattttgtatctgttgttatctgaacctgatgactatttagttgtgcaagatttcgcagatagggtacagtgttctgaaaaaacaatccggaatgatttgaaagtgattgaggattatctcaatgagcattctcatgcacagcttattcgaaaaccagggttgggcgtttatttacatatagaagaacaggaaaggacctggctaagccaacaattacatactgaacatttttcttctaggcagcggagcgatgaagaaagaatgctgcacattgcttatgacttattaatgaatccgaagcctgtttccgcaaaagacattgccgctcggcattttgtcaatcgatcttccattaaaaaggatttatacgcagtagaagagtggctgaagcgttttgatctcacactggtttctaggcagcggcttggattaaaggttgaagggaacgaaagaaataaaagaaaggcattggcaagaatatctgatttgatccacaatacagcgtttaccagccaatttattaaaagtaagtttttacattatgaagtagactttgtgacgaaagaaatcaaatcattgcaaaaaaagcattccctctatttcacagacgaaacgtttgaaagtttgctgctgcatacattgttaatggtccgccgcatcaaaatgaagcagccgatttcattgtccccaaaagaaatggcggcagtaaaaaagaagaaagaatatcaatggacatttgcttgtttacaacggctcgaaccggtttttgcaatccgctttcctgaagaagaagccgtgtacttaacattacatatattgggcggtaaagttcgttatccattgcaaacagaagagaaccttgaaaatgctgtgcttcctaaggttgtagggcatttaatcaatcgtgtttcagagctgaaaatgatggattttcataaggatcaggatttgatcaatggtttgaacattcatctcaatactgtgctacaacggctgagctacgatctttctgtagcaaatcctatgctcaatgacatcaaaaagatgtacccttatttgttccaccttatcattgatgttttggaagatatcaatcaaacttttgatcttcttattcctgaggaagaggcagcatatttgacattgcattttcaggcagcgatcgaacggatgcagggcagcagcgagacacataaaaaggcgattatcgtctgccacatggggattgggatgtcacaattgctgcggacaaaaattgaacggaaatatcaccaaatcgctgtaatggcttgtattgcaaaggccgatttaaaggattatatcaaaaagcatgaggatattgatcttgtcatatccaccattgcgctggagaatataacggttccccatattgttgtgtctccgcttttagagcctggcgaagagaagaaattaagtgcgtttatatgtcagctgggcgaatcacaccgccaaaaacaaaaaacgtttcagatgctgaacaatacgactccttttttggtttttttgcagcaggaggcagagcaccgctacaagttaatcgaacagctggcgacagctttgtttgagaaaggctatgttgataaggactatgcggttcatgcggtgatgagggaaaaaatgtcggcgacaaatattgggtcaggcattgccattcctcatgcaaacgctaaatttattaaacaatcagcaatcgcgattgccacattaaaggagccgcttgaatggggaaatgaaaaagtttcgctcgtttttatgctggctgtcaaacacgaggatcaaaccatgacaaagcagctgtttagcgagctttcatatcttagcgagcagccggccttcgtccagaagctgacgaaagaagccaatgtcatgacatttttatctcatttggattattaaaagcagggattattccttgcttttttttgttatagggaaaaatgcctttattaccggaacctatggtaaaaaaaagcgattttaatgagctgatttcggtatacagttgagacaagatcttataattcacactttaaaggagggttcctatgaaactgttagcgattacatcttgtccgaatggaatcgcccatacatatatggcagcggaaaatctgcaaaaagctgctgacagactgggcgttagcatcaaagttgagacccagggagggattggtgtcgaaaataagctaaccgaagaggaaattcgcgaagcggaagcaatcattattgctgcagaccgttcggtaaacaaagaccggtttataggcaaaaaactgctgtctgtgggggtacaggacggtatccgcaaaccggaagaattgattcaaaaagctcttaacggggatataccggtctatcgttccgctacaaaatcggaatccggtaatcatcaggagaagaaacaaaatccaatttaccgtcatttaatgaacggcgtttcatttatggttcctttcattgttgtcggcggattattgatagcggttgcattaacgcttggaggggagaaaacacctaaaggcttagttattccggatgattccttctggaaaacgattgaacagatcggcagtgcttcattttcatttatgattccgattttagccggctatatcgcctatagcatcgctgataaaccggggcttgtgccaggtatgatcggcggttatattgcggcgactggaagtttttatgacagcgcaagcggcgccggattcctcggggggattattgccgggtttttggccggatacgctgcactttggatcaaaaaattaaaagttccaaaagccatccagccgattatgccgattattattattccggtgtttgcatcactgattgtaggtttagcgtttgtatttttgataggcgcgcctgtagctcaaattttcgcctctttaacagtttggctggcggggatgaaagggtcgagctcgatccttctggcattgattttaggggcgatgatctcatttgatatgggcggtcctgtaaataaggtggcgtttctgtttggatcggcaatgattggagaaggaaattatgaaattatgggaccaattgctgtcgccatttgtatccccccgattggtcttggcattgcgacgtttttaggaaaaagaaaattcgaggcatctcaaagagaaatggggaaagcggcatttacgatgggtctcttcggcattactgaaggagcgattccatttgcggcgcaggaccctctgcgcgttattccaagtattatggcaggctcaatgacaggttctgtgatagccatgattggcaatgtgggagacagagtggcgcacggcggacctatcgttgcagtgcttggcgcagttgatcatgtcttgatgttttttattgctgtgattgcagggtctcttgtcactgctctgttcgtcaatgtactaaaaaaggatattacggcgtctcctgtgctcagtgaaactgcaccgacctccgcgccaagtgaagctgcggcagcaaatgaaataaagcagccaattcaaagccaaaaagctgagatgtcggaatttaaaaaactgacagacattatcagcccggaattaattgaaccaaatttatctggggaaacgagggatgacatcatagatgaattgattcagaaattgtcccgaagaggtgcgctgctttcagagagcgggtttaaacaagccattttgaatcgtgaacaacagggaacaacggcgattggcatgaatatcgcgattccgcacggaaagtctgaggcggtcagggagccgagtgttgcctttgggatcaaacgatcaggcgttgattggaatagcctggatggatcagaagctaaattaatctttatgattgctgtaccgaaagagagcgggggaaaccagcatctcaaaatactgcagatgctatctcgaaagctaatggatgacaattatagggagcggctgctctccgtgcaaacaacagaagaagcatacaagctgctagaagaaatcgaataaagcgggggattttcatgacgactgaaccgttatttttcaagcctgttttcaaagaaagaatttggggcgggaccgctttagctgattttggctataccattccgtcacaacgaacaggggagtgctgggcttttgccgcgcatcaaaatggtcaaagcgttgttcaaaacggaatgtataaggggttcacgctcagcgaattatgggaacatcacagacatttattcggacagcttgaaggggaccgtttccctctgcttacaaaaatattagatgctgaccaggacttatctgttcaggtgcatccgaatgatgaatatgccaacatacatgaaaacggtgagcttggaaaaacagaatgctggtacattattgattgccaaaaagatgccgagattatttatggccacaatgcaacaacaaaggaagaactaactaccatgatagagcgtggagaatgggatgagctcttgcgccgtgtaaaggtaaagccgggggattttttctatgtgccaagcggtactgttcatgcgattggaaaaggaattcttgctttggagacgcagcagaactcagacacaacctacagattatatgattatgaccgaaaagatgcagaaggcaagctgcgcgagcttcatctgaaaaagagcatcgaagtgatagaggtcccgtctattccagaacggcatacagttcaccatgaacaaattgaggatttgcttacaacgacattggttgaatgcgcttacttttcggtggggaaatggaacttatcaggatcagcaagcttaaagcagcaaaaaccattccttcttatcagtgtgattgaaggggagggccgtatgatctctggtgagtatgtctatcctttcaaaaaaggagatcatatgttgctgccttacggtcttggagaatttaaactcgaaggatatgcagaatgtatcgtctcccatctgtaacatagcagggcttgagaaataaatttgcgagtgaagacgcctattctgcagcaatgatctaaataaaataagagtttaatagttggagaagaaatgttacactcttttctgtatatggtaaagaatgaaaaaacacgattcggttggtagtccggatgcatgattgagaatgtcagtaaccttcccctcctcgggatgtccatcattctttaatatcttttatgaggagggaatcgttatgaaattaacgatttactacgatgatcagttttgggtaggcgttgttgaagttgtggacaatggaaagctaagagcctttcggcatctttttggcaaagagccgagggattctgaagtattagagtttgttcataaccaactcctgaatatgttggcccaagctgagcaggaaggagttcgtttacaaggcagacgtcaaaaaaagatcaatccaaaaagattgcagcgccaggtttcaaaagagttgaaaaacgccggagtagcttctaaagctcaagaggcgataaagctagagcttgaagcaagaaagcaaaagaaaaaacaaataatgaaagaacaacgagaacatgtaaaagagcaaaggtatatgctcaaaaagcaaaaagcgaaaaagaagcacagaggtaaataatccaaacaaaagcaggcgcagtgcctgcttttgtaattaaggactctactttgtaacatatatccaatgtttatactccgctgatttatgattcaatataaaccctaacttctccaaggttttttgtgagcctagattatcatgttcgcatcttgcggtgatccgggatactgtttctcggcttaatgcccagtttattagtttttgggcggcttccacacaataacctttgcggcgatgacttttatttgttgcaaaaccgatttcaatcatgccattttcgtctgggtcacctaaaaatccagttcctccaacaatttcatgactgtccttctttacaataatccatgaatcaaatccttttgttccattgtttttgactaaaatctcgcggaaataaggtatcgcttcaaaaaaatcagaatttggccattcaccatttgtttcataacctaagtctttgatagcctgatgatcttgtttagacgcggcgtcaagaaggggaatatcaatcgtttttaatcgtaatcgattcgtttcaaggagaaccatatatctaatcctcttttctttttactgggaataatgataacatataacaattttctctgataccttggcagtagagaaagatggaaaaattgagggggattgaaagagtgacaggggagagtttgcccagaccaaaaacgggtaggaaaatgctgatgttaatgtgtccctacccgtttttctgttcctgaatgcagggtttctgataacatgttgtgctaccttttcgcaatcaaataaagcgatatggctctttgggtttgaacaggattatgaatgataatgacccattggtttcttcgtcttggaaagcttgctaccgcatacaatggagcagtatcgcgcggagtgaacccaccatttatcacgttgatatctcttccttcaagatgacaaactaagtattcacctggattgatgacctgttggttcgtccatgcgtaagaataaaagccgtctccaagatcttcggtggaagatggggggacaaagccatctacagtcaatgtgatttctcttcttcgctgtctttctgaaaaatctggacttctttgagggttatgagtatgtgaaaagtaaggaattaacgcagggccataaaagtaatgatacaaagcaaccactcctttattttccattcatacaaattgtatgtgggagttatttgttcattcctgttttgttccatgtagactaataatgggctataggcgtccaaggaaatcaatttgtcctttcgttgattcaatgctagtaaccttgaaaatgcaggttaggatgatagaatttacttattactgcaagaagttagatatacatcattttgatagtgggtgaaaacaatggcgaaaaaaatggcaaaaacaaatgcggttcgtctgatagaacagcagaacatctcttatgaggtattagggtataaaacagacggccagccggtagatggcatctctgttgcggaaaaaatcggttatcctttgaaatatgtatataaaacgttggttgcagcaacaggaacaaatcattattatgtctttgttgtacccgttgcagaagagttagatgtaaaaaaggcagcaaaggtgacaggggaaaagaaaatagaaatgattgcaatgaaggagctgttagcggtaactggctatcttcgcggcggctgctcgccaattggcatgaaaaaattgttcccgacctatattgatgcatctgcagaaatgcttgattttattattgtcagtgcagggaaaatcggtatgcagctaaagttggcgccacaagatttagccagatcatgtgatgccgcatttgcagaaattgtatagatgcagatataggggaacgaaaaagcttagtcatatcgactaagctttttccgcatccctttcaaatatgatttcaaaataagcagctgccccatacccatctatactgggagcgaaaatctgaacgaatctccagcctcttttcgcataatcatggatgatttgctggtagtcttctttaggccttcttctcatcgtactcagctcaactcttacgaattcatattctttcatcgtttgatccctcctattaaggtatacgtaaaatggagcgagaagttccgaaaagcctcactaaacacagaaacatcttgaagagttaaggggctataaaaacgaatttcaccgggtcagcagtccaaatgaatctcttgcttattgcatttgactgagtatataagtaaaaaaagagcggtcagaacatataagaaggagatgatcattaacgcactcataacagggtagtgtttagcggagtagatgaaaaaatcaagctgtgaaatttgtttggggctgctgacggcatcaattccatttagcagttttgagagtttagcagtatagttccaatcaaatcgatctgaaacaagctcgcttccttgataccaattaacagcagctaaaaacagaaataccataatagaaaatccaagctgaacaactaaaaatattcccttcacttttgtatgacctccaaatctatgaatatgggaaaatcaaacaatatattaccaccgtatgggttattcttgcaatttcactttcatacaactcaaacgcaagtctatttttttgtttgtttttggcttataatacctgatgatggaaaaagagtgcgggtttatagattagagaaacaaatgtatttcttagcattttttatttgtggagagagtatagaagcattcgattagatctgctttttcacagaaacgcttttcatctgtttgcctgagctttacaattctggcaaaaaaacaatgatttctttcaatcaaaacatgcaacgatgcgacatattttatatcttgatgacttatctcattgcctttaagtcattctatcgagaaagtgatggtattttatgaacaaagaaaccctaaaaaacatactcatgattttttcaatatgcgcaaccctccgagaaaccgatggtatgcgcatagctgatagctggattttgagtgagattatacgatttttgatttgcatggctgtgttttttgccatgacatttctattagatgctgtttttccaaacaaaaaagagtcacattaatgtgtggctctttttgcatcatctgatcagaaacatcataaatgaatcgatcatcatgatgaagaacagcaagcaaaaataaataagcgagtagacaaacatatcctttgcccacttcacgtcatcgtctgttttgaatcctttgatgctttttttgatccatatgcctccgagaaccaaggcggctaagaaataaaatgggcttatatggccggtgcctagagagaaaggaaataatagcgtgaccggcaccaggacggcaatatattgcatcatttttatttttgttacatgattgcctttgactactggcaagagcggaacgccagcagcgcgatattcctctttgcgtcttatcccaatcgcccaaaaatgcggcggctgccacagaaacataatcgtgtacaacagcactgctgtcatactgaagtcaccggttacggcacaataccccatcaatggcggcgcagctcctgggaagctcccgacaaatgtgctccacacagacgttcgtttcacccataccgtatagatgatcgcataaaaaataaaggcggccagtccgagataggccgttaatggattgagggaataaagcatggcaaggcctgcgatccctaaaacagagccatatgttaagatcatggctggcggcattttccctgtgaccgaggccctgctgcgagtgcgtgccatttttgcgtccatatgccgatcaaaatagttgttatagacagtgccggaagccatcacaaacgcggttcccaacattgctgttaccattgtcatcaaaaaagccaagccggttaacgttttttctgcgcttgcaaacgcgatccaaaacccgccgaaggctgctatcgagtttgatatgataatgcccggctttgcaagtttgataaaatcgtaaatggttacccggttcgaagcttttatgtattttgtttcagatatggctgcagaatctcttgtattctccaaaaatagacgcctcccccaaaactgcatgcttttgttatcgtaacaagagggggacagaatcacaattatttcctatatttgtcatgatattgtcatttttaaaacaaaaaaatggggagctggactgcccccattttgatatgcggcgactagtaaccgtaacctccgccatatcctccgccataaccgccgccgtaaccgtgccaagggtagtaaggcggtcgcgggcgcgggtagtaataaggcgggcgcggataaaacgggtagaacggataatacggtcttggataataataaggcggataaaatggcggtctcggacgcggataataataaggctgtctttcatcataaggggtaatttgttcaaatgactgttcattcaaagggtaatccaagaggaaaacctccctagctttttttattccttttaccatattcctgatgcttaagttgggtgtatgtacattcatgaaattcggttttttttatgatgaaattccttaaaaaggattgacatgaacttctaaatctcatagtattacaaatgtgaaataaatgttactacaatgttacaaaaacatttctaaatagatacagttccaactgatgaagagtaaatcgaaatggctacgaaagaaggagtttttgttgttggcaaaaagaatcaaatggtttcatgtattaatagcagttgtatgtgtggtgggccttatcggctttttccataatcattcattgaaaaaagaaacggtcatgaataaagtaagaactgattctcaatatgggaatgttgagatcgcaacgcttgtgaatgacgggaaaacttttaattacgcggttaactatcccgttttcaaaaatgaaaaaatggattcggcattaaaaagattcgcagaaaaagaggttcgtcaatttcaaaaggaaacaaaagacgttgaccaagagcatacgacaaaacgcaacgaattaaatgttgattataaaattgtccattatgccaaacagacagtggcgattgtatttaatgaatataaatacatcggcggggcacacgggcaaaccgtgaaaaaaacgtttaactatgattttagtaaacaagcgtttctttccattgatgatattttcaaagaggacgctgactacttacataagctttcgttaatcgcttatcacgagctgaaaaagaataaggacattgccgcggacgatgcactgttaaaggaagggacggctccgaaaaaagaaaatttcagccgctttgccatcaaggaggattatatcgaactttactttgacacatatcaggttgcagcaggctatcttggagagcaatcgattgccattaagaaaagtcttttgaaagacattctgaaagaacaatatattgataaagcaaaaaataaaaataaaatcaaagaacaaaagccgaagcatgaagtgatttctttacccaaagaggaaacggttgatccaaatcaaaaagtcattgcgcttactttcgacgacggcccgaatcctgcgacaacaaatcagattctagactccttgaagaaatataagggtcatgccacgttttttgttttggggagcagggttcaatattatccggaaacgctaataagaatgctgaaagaaggaaatgaggtggggaaccattcatggagccatccgcttctcacaaggctttcagtgaaagaagcgttaaagcagatcaatgatacgcaagacatcattgaaaaaataagcggataccgtccgacgcttgtaagacccccatacggcggcattaatgatgaactgcggagtcaaatgaaaatggatgttgcgttatgggatgttgacccggaagattggaaagaccgtaacaaaaaaacaattgttgaccgtgtcatgaatcaggcgggagatggaagaaccattttgattcacgatatttaccgcacctctgctgatgcggccgatgaaattatgaaaaagctcaccgatcaaggctatcaattggtgacagtttctcagcttgaagaggttaaaaaacaaagagaagcgaaataaattaaaaaaggctgtccgtacggacagccttttttctatttaataagagcctgtggtggcccaaacatttaagtttggtcctgaatacttgccaaaagcgtaagaagtccttggatctaaatcatataccatcggtgtatagcaagacttttggccggccaccgcttttccattgccgcctgcagaatcacaattatatctctttccgtccgtgtttcgggtaatctccgcatttgcttcaaagccagacgtcaatgtattattcatcgtgatttttgcccaagccgttttacatgtactgctgaatttaagctcgactactccgatgacttgattgctggcattcactaagtttgaggatttttttgtagagccgctggacgcacaatcattgtaataagggctttttccatcgtaggcatgggtttccgcattggcgggtacacctttgacggcaaaaacaaatactactgcaaataacaccaatgaagccttcgtaaacagtcttttcatatcctttatgacctccttaatatggcaaacaataaatcatacggaggaacaatcaaaacatgcatgcttttttgtgaacaataaaggcggccgggaggatggagttcttggccgcctttgatgtgaggttaaacttttacatcaatggtttgtccgagagtcggatgctgaatcatctttaaggtttgatcggcattttgctgggcggtatccagcatttttttcgttaaagcgatattaacattctgggcaagggatgcttgatgcattgcaaccgataaagcaggaatatccatcgttccacctcctatgccttacctatcggcggctttgtatcattttacagtgaaaaatggcttaattttcgctgttgacccctacgctgcggcatatcgtatgtttttgacaaggagggaatcaggatgaatcttgtcatggaaaagacctttgagcaatacgaaaagctgttttcaatggaagaacagaaaagagaagatgaatttcggtatacgatgatgaggccgtttgaaaagatgtggaccgccatccatgttccgctgaaagcgaaggagccaaacggctatgatgtgatcatggctgcgaaaatgcttggctatttggatgtccgtgatgttgaaatcggacagaaagcactgcgaatactgaaagaatcacatgtttcagagactgcggaatctgcacttcggcaatgcatattttttgatgagcgcgaacagctgcgggtgaatgcaaaggagatcaaattcggcctttatatcgctgatccaaataagcttcagctgcaaaaaggctactgcgggtttggcgggataccgggctttattcatgtatggattgatccgaaccgttataacctgccaaggattccttccattattgctcatgagtttcatcataatttgcggttttcgtatatagattttcatcatggctctgtaagtgtcggggattatcttgtgattgaaggattggcggaatcattcgccagagagctgtttggtacggaacgattgggcccttgggtaactcgttttgatcatgaggatttgcaatattccattgatgtgattaatgaggtgttggatgtgaaaggattttcggaagtcagccgttatatgtttggtgatccaattgctaaagacaaaggatttgaacctgtaggtttatcggcttttgcgggttatgcagttggctatcatgccgttcagtcatttatgaatcaacatcatatcacgataagcgaggccacacgtttggatgcgaaggccattctttctcagtgcggattgttttccaaatgaaaaaaagcgtcacatacagcggcgctttttgattcccaaaaccagcagttctatggcggcacaggcggcaattccgattgtatatgcttcgatatcgctccataaaaaaccgtaccctagtacaagcccgccaagagaagtatctctaatctggtcgatccattcggcatgatagagctggctgaattcaatgacaaaacagaaagaaagactgataatgcccgttatcattgtcttcagcttccgaaatagaaatccgcatcccgtgaagatcatggcggcccacaacgagtctcccagataagtattgagggtatcaggaagaacactggagaatgctctggatccaagccccagcccaatgatcagtatggtgaaaactgcatatatccaacgatttcgcttcattgcgaattgataccccgtctctgcttcatctccctgtattgtaaggaatatagcttttatttgtccactaaaaaagcggctgaatagccgcgtagggtgtttattttgcttttaggtttacatggtcggctgtctgatccgtgcctattacaaaatggagttcatagcggcctgtatcatatacataatcgatttcatcggtaaacgggacggttaacacccgatttgctggtcctaattgcttctgcagcacttccggcgtaactccgcctaaattcagctgccgttccacaccggttccaaagtatcggatttctgaaattgtcatgtctttatgataggaaaatccgtagcccggctgtcccatattccagtgatataaatcaaatcgattgtctcccccgactggtctttccggttccccaaacgcagcgtggacatccccttttgtgcttttgttaatggtaaggccttgcgcctgctgaggcatttctcctttgtaggcggtgttgtaaaggtttttgacgagctcggaggctgattgggttgtattttcatagagtgtatttgtttgagctgcggcctttgccggtgctgaaaaggacgcagccccaaagccggtaaaacagcttgttactgctgctgccgcggttatagcagacattgtctttttcatgttaatccctcctaattgatctaccattccgtttccccgtgtttttgcaacgaaacatgtgagtgcgctttgtatgttttattgagttgttgtaagggaactgaaataggtaattcggtatataaagcaagaaaggggaatggagatgcctggcaagaaaaaaatcacaataaacggcgttgaaatggaagcgtccgaggaacagacggtgctgcagcttttgaataacagctcgattgaagtgccgcaagtttgctatcatccaagcttagggccgattgagacatgtgatacgtgcatcgtcagcatcaatggtgagctgaagaggtcgtgctccgctgaattaaaggatggggatatcattgatacgctctcacctgacgtgaaaaaagcgcaggtcatcgggatggacaagattttatataatcatgagctttattgtacagtttgcgattacaacaatgggggatgcgaaatacataatacggtgaaggaaatgaaaatcaatcaccaaagcattccgtttgatcacaagccataccataaggatgaatcccatccgttttatcggtatgatccagatcaatgtattttgtgcggacgctgtgttgaggcatgccaggacgttcaggtaactgaaacgctgaccattgactgggagcggaaacgcccgcgcgtcatttgggataacgacgtgccgatcaatgagtcgtcatgtgtgtcatgcggccattgttcaacggtctgtccgtgcaacgcgatgatggaaaaaggaatggaaggggaagccggatatttaacaggcatcaataacgaaacgctgcgaccgatgattgagatcacgaaaggcgtagagacaggctacggctcgattctcgccatttctgatatggaatcggccatgcgtgatgaacgaatcaaaaaaacgaaaaccgtctgcacgtattgcggcgtcggctgcagctttgatgtctggacaaagggcagagacattctgaaagtagagccgcaggaggaagcgccagccaacggcatttctacttgtgtgaaaggcaagttcggctgggatttcgtcaacagcgaagaacgcctgacaaagccgctgatccgggaaggcgatcatttccgtgaagcagagtgggaggaggtgttatcgctgatcgccagcaagttcactgaattaaaagaggcgtttggcccggattctctcgcttttattacatcttctaaatgtacaaatgaagaatcctatcttatgcaaaagctggccagaggggtcattggcacaaataatgtggacaactgctcccgctattgccaatctcctgcgactgccggcctgttccggacagtcggctatggcggtgattcaggatcaattacagatatcgcgcaagcggaccttgttttgattatcggttcgaacacgtctgagtcgcatccagtcttatccactcgcattaaacgggctcataagctgagagggcagaaagtgatcgtcgcggatatcagaaaacacgaaatggcagaacgctccgatttatttgtccagccgcgtgccggatcggatatcgtctggctgaatgcgatcgccaaatatttaatagaaaacggcaaggccgatgaacgatttttgagagaaagagtgaacggacggcatgaatatgtaaaaagcctcgcgccgtacacacttgaatatgctgaggagaaaaccgggattgatcaagaaacccttatccaaatggcagagatgatcgggcaagctgacagtgtgtgcgcattgtgggcgatgggcgtgacacagcatattggaggaagcgacacgagcacggcgatctctaatctgctgcttgtgacaggaaactacggaaaaccgggagcaggttcttacccattgcgcggccataacaacgtgcagggagcaagtgactttgggagtatgcctgacagactaccgggctatgaaaaagtgacggacgaacaagtccgccaaaaatacgagcgggcatggggcgtaccgctgccgaaggagccgggtatgaccaaccacgaaatgattgaaaaaatccattccggacagttgaaagcgatgtatgtaaaaggtgaagaaatgggccttgtcgactccaatatcaatcatgtacacgctgcatatgaaaagcttgatttctttgtggtgcaggacattttcctttcacgtacagcggagtttgctgatgtggttcttcctgcgagcccaagccttgaaaaagaaggaacgtttacaaacacagaacgccggattcagcgtttgtatcaggtatttgaaccgctgggtgaatcaaagccggattggcagattattatggaggttgccaataagcttggcgccgactggctctatgagcatcctgcagacattatggaggaagcagccaagctgtcgccgatttatgccggtgtcacctatgaacgtcttgagggctataattccctgcaatggcctgtaaacgctgatggaaaggattcgcctttactctttacagagcgcttccctttcccggacggcaaggccattctctaccctgtccagtggacagagcctaaggaattcggtgaggaatatgatatccatgtcaacaatgggcggctcttggagcacttccacgaagggaacctgacttacaaatcaaaagggatttcggagaaaacaccggaagtgttcttagaaatttctcctgagcttgcggcagaacgagggattcaggacggaaccctcgtcagactcacatcgcctttcggaaatgtcaaagtgaagtgcctgattactgatcgagtcaaagggaaggaagtatatctgccaatgaacgattcaggggaagcggcgatcaacctgttaacaggcagccatgccgataaggataccgatacgcctgcttacaaagaaacatcggccaagatggaaattttgaagcacgacggaatcagcccgctgcctaagatcaaccaccgcaacggcaatccgcagccgcaaatcggtgtgcaggttcataagaaatgggcgcggaaggattatattttccctggtgacgctgtgaaaagggggatgggccataatggctaaagcgattaaacgaatccaaaaaatcgaggtaacagaagaggatcagcgaaagcgtgatttgcgggaaattgaagatgctctaattgaccacaaagaagcgattctcgaaacattgcatatgctgggccatatgaacgagcgcggtgtcctgccgttgctccgcggcctttttggccaaggggataaagttcttgatatcctggtgaaaaaggcagatacagaggaaacagccaatacgctgaaaaatctgcttcttctgtttggaacactcggcatgctggacgtgaagcagctggagcctctcattttgaaagtgaatgcgggtgtggcaagcgctgtagagcagaaaaacagtgaagaaaagacaggttattttgatattatccgctcgctaaaagacccggaaatcaacaaatcaattacactgctcttttcctttttaaaaggaatgggacaagatacaaaggagctggaacgcacgacgcagcctccggaacaccaaaaacatcatcaggaacctcgagagaaaagaggaatgaataagcgagattgacctcccacccgagcggcttcagccagctcgggttttttgatgaaaaggtctaatggactagtaaaaaatattcaaatactaggaagaagtaagattgtgatgaatgagatagaaataatcgttactttcttacctgttaagaaaaggaaaaatctgattataatagaaatcgattactttagatgggggaacaatcatgaaaaaagtcttattactattatttgtcttgacgatcgggttagcgctttctgcgtgcagccaatcgagcgatgcgtcagagaaggaaaaaccgaaagagaaaaaatcgcaagaagagcttgaaaaggaacttgataaggaattgaaaaaaggcggtgagccgaagaccaaaaaagatgatcaaatacataaaataggagaaacatttaaagcaggacatacgaattttacagtgaataaagttgatagagtgcaaaaaggtgaatatatgaatgttggcggagctgtaaatgaggagacaaaaacaataaaagatgatgaggaacggcttattatagaagttacgatggaaaatataggggaagattcaataagctacaattttatcgggtttgatttaagagataagaatgatcaatcagtgcggcctgttttttctatagaagagaagggcagaatccttatgggaggaacactagtatcggggaaaaaggttacaggtgtactcagttatgtcatccctaaaggagaacagaaacattacacactggtatataatccgtttttagctgatacaaatagcagtaatacagaagagagagtaaaggacgatattgattacttggtgaagttagattagaagctaatttacagttgcacgtttttcatctgtggaaaacgtgcattttttatagcgaaacttgacttgaaaggatgagtgataaaagtgcaaaccaaatggctggaacgggcacagcgaattcgggcgatcgcacaggctgggcttgctttttccaaggatgtgtacgacagggagaggtacgaagagctaatgaagcttagcacggaaatgatggcggattactcggagaaggacattgaagttatcactgatttatggcaaggcgagaagggctatccgacaccgaaagcggatgttcgcggcgcagtattccgagagaatcagattttgcttgtccgggagaagcatgatgagctgtggtcgctgccgggtggattttgcgagattggtttatcgccagctgaaaacgtcgtcaaggagatcaaagaagagtcggggtacgatacagagccgtctcgattgctggccgtgctagacagccataaacactctcatccccctcagccttatcactattataaaatcttcatcgcatgcagcatgacgggcgggcagggggaaacaggggtcgagacgaatcatgccgctttttttccggaagacagactcccgccgctctctcctaaacgaaacacaccctcacagcttagcatgctgtttgactttttgcgccatccggacaagaaaacgatatttgactaaaaaagaaagagcctatgggctctttcttttttataatgtaatgtgtttttcgttggcgagtttcagaagggtcaaaatagaatcggcttgtttatggccgagtttttgctttaatttgttttcttcaactaatcggctgccataaattttgacagaggctttgtcgacgacagtatgccagttttcctgtttttttccctcaacaagcggtttttcatgtctctcagaaaaagagaacacaaacagtacgaatgcaagtgaaagtaggatgccgacaacttgttttttgtaatcagtctgtgctgccacgttgttctctccttcaccttttaccttctatttaatcatagaatcagcttattttacataatgggaaagtcatttttggagttagtgcatttggttgaaaacagaggcgttttttgagcggagcggtgcaattgaatctatattggctttgcgtgcttatgcctaaggtcacgttgtgaaccaaaacagcagtgcagaatagaaaaaaattgaaagattatggtaagatgaacgaaattcgagggggaatatatgatgcctgcatcaaacatcgtgatcgcctgcctgctgttatcaatttaattatttgtggtagtccctctctttttcgaaagcgggaggtgaagtggaacattaattgctgaattctttcaaggggagtgaccgtacatgaatgtgttaaaccgccggcaagccttgcagcgagcgctgctcaatgggaaaaacaaacaggatgcgtatcatccgtttccatggtacgaatcgatgagaaaggatgcgcctgtttcctttgatgaagaaaatcaagtgtggagcgtttttctttatgatgatgtcaaaaaagttgttggggataaagagctgttttccagttacatgccgcagcagacaagctctattggaaattccatcattaacatggacccgccgaagcatacaaaaatccgttcagtcgtgaataaagcctttactccgcgcgtgatgaagcaatgggaaccgagaattcaagaaatcacagatgaactgattcaaaaatgtcaggggcgcagtgagtttgaccttgttcacgatttttcatacccgcttccggttattgtgatatctgagctgctaggagtgccttcagcgcatatggatcagtttaaagcatggtctgatcttctggtcagtacaccgaaggataaaagtgaagaagctgaaaaagcctttttggaagaacgagataagtgtgaggaagaactggctgcgttttttgccggcatcatagaagaaaagcgaaacaaaccggcacaggatattatttctattttagtgaaagcggaagaaacaggcgagaagctgtccggtgaagagctgattccgttttgcacgctgctgctggtggccggaaatgaaaccactacaaacctgatttcaaatgcgatgtacagcatattagaaacgccaggcgtttacgaggaactgcgcagccatcctgaactgatgcctcaggcagtcgaggaagccttacgtttcagagcgcccgccccggttttgagacgcattgccaagcgggatacggaaatcggggggcacctgattaaagaaggtgatatggttttggcgtttgtggcatcggcaaatcgtgatgaagtgaagtttgacaggccgcacatgtttgatatccgccgccatcccaatccgcatattgcgtttggccatggcatccatttttgccttggggctccgcttgcccgtcttgaagcaaatatcgcgttaacgtctttgatttctgcttttcctcaaatggagtgcgtcagtatcactccgattgaaaacagtgtgatatacggattaaagagcttccgtgtgaaaatgtaatagataaggagactggagattcatgaaaaagtaccatatttcgatgatcaatatcccggcgtacggacatgtcaatcctacgcttgctttagtagagaagctttgtgagaaagggcaccgtgtcacgtacgcgacgactgaggagtttgcgcccgctgttcagcaagccggtggagaagcattgatctatcatacatccttgaatattgatcctaagcaaatcagggagatgatggaaaagaatgacgcgcccctcagccttttgaaagaatcactcagcattctgccgcagcttgaggagttatataagggtgatcagcctgatctgatcatctatgactttgttgcgctggctggtaaattgtttgctgaaaagcttaatgttccggtcattaagctctgttcgtcatatgcccaaaatgaatcctttcagttaggaaatgaagacatgctgaagaaaataaaagaagcagaggctgaatttaaagcctacttggagcaagagaagttgccggctgtttcatttgaacagttagctgtgccggaagcattaaatattgtctttatgccgaagtcttttcagattcagcatgagacgttcgatgaccgtttctgttttgtcggcccctctctcggagaacgaaaggaacaagaaggcctgttgattgacaaggatgatcgcccgcttatgctgatttctttgggtacggcgtttaacgcatggccggaattttacaagatgtgcatcaaggcatttcgggattcttcatggcaagtgatcatgtcggttgggaaaacgattgatccagaaagcttggaggatattcctgctaactttactattcgccaaagtgtgccgcagcttgaggtgttagagaaagctgatttgttcatctctcatagcgggatgaacagtacgatggaagcgatgaacgcaggtgtgccgcttgtcgtcattccgcaaatgtatgagcaagagctcactgcaaatcgggttgatgaattaggccttggcgtttatttgccgaaagaggaagtgactgtttccagcctgcaggaagcggttcaggctgtatccagtgatcaagagctgctcacccgcgtcaagaatatgcaaaaggatgtaaaagaagctggcggagcggagcgtgcggcagctgagattgaagcgtttatgaaaaaatccgctgtcccccagtaaaaacataaaaaccgaaatcaatttgatttcggttttctgtttaaatattttttttcatcccgcatctccggcattctctaagaaattttccgccttttacagagcttttgaacagtgtgtaatcacagttgtcgcagcgcccgctgcgggcgtccggatattcattgaattcgtaaacgatcgatgtatcgtagccttttgtttcatattcttctttttttgtttccatgtcgtccctccgttacaagacgtgtctgctgtttatcttacagcaagcttccggcgtattcaatggattttagaggtttgggtttatcttgatttctcccttggtttgcgccaaaatagctttaataagcttgtatacataaaaagcctatgcaaagaggagaggaaacgggtatgggaaaagggttacttggaaaacgtgtggcaatcggtggctcacgaaaaacggaagaaatcagtacaatcattgaaaaacagggcggaatacctgtcatccggcctctccaaggtacagtttacttagcagagaagcaggtggagccggatttgcggacgtttgcggaagaaaaagctgactgggtcattttcacgacaggcatcgggttggagactcttgtcgatatggcagagaaaattggactgaaagatgaatttctgcaggccattcgccaagcgaaagcggcatgccggggatacaaaacgctgtctgcgctgaaaaagcttgggatcacaccggaagcttcggatgaagacgggacaacaagaggcttaatccgttctttggagcctcacgacttttcaggaaaaacagtcatggtgcagcttcatggcgaaaaagcgccggctctcatggcatttcttgaagaaaaaggcgcgtctgtcctgccgattctgccttatcagcacatcccgccggaggaggaaacggtggagcggttatgccgagagctgatgaaccgtgagatcgatgccgtttgttttacaacggccattcaggttcgttccctgtttgattttgccaaggggcgaggttatatcaatgaagtgaagaaggtattcgaagaacgcgccatcgcagctgctgtcggaaaagtgactgctgaagcactgcgggaagagggcattacgagactgcttgcgccagagattgagcggatgggtgcgatgattgttgagctggccaagtattatgaagaaaaggaataacaagtacaaaaagccgcttttccctcggaaagcggcttttgtctgtcattcattctgcttcagctgctgatgaacggtgaataatgatgggtatgtcagcacgcttaagattacacaagtcagcgcggctgaggccatcgttgtaaacacgattaagagttgaaagcgtactgcctgaatcgggtccgcgccggctagaatctggcctgtcatcatgccgggaagctgaacaagacccagtgttttctggctttcgagcgtcgggatcatactcattttcatcgctgaagtaagaatgcgctgtatggattgcttcggtgtgccgccaagtgacaatattaattgaatttcttctttgcgaacgccgacttctgagttaagccggtttagaaacaaacttgagagcaccatcgaatttccgatgaccatcccgctgatcggaatgacatatcgtgccgtaagcggaatgatatgaagagacagcagaattccctgcgtcaccatttctacgattgctaacgcggcaaacaccctccaaaacgaaccgattgtatttttctttcgcttgatgacattttgcgccgccaccgcgagcattaacagcaccatcagcaggataaaaacagggtggtctccgcgaaaaatcagcgacaaaacataaccgatgataagcagctgcaccgcggaccggatggtggcgatgatcatgtctttttctaccccggctttaaaggattttgataaaaacaaggcgatcaaaacaaagatcatcgttaaagagagagaaaggtaatccattaccgagtgcctcccttcaaaaattctttcgctgcttcatgctgcggagcggagaaaaatgtttcggtttcggcgatttcaagcagccggccatctgccataaaccaaatggtatcggctactcgttttgcctgctccatattatgagtgacccacatgactgtccattttttctcttgatgctgacgtttgatcagttcttcaatctcaagagcagaaaccgggtccaaggccgacgtgatttcgtccaacaatagaatggaggaaggatttgagagcgttctggccagtgacagtctttgccgctgcccgcccgataagtctctggcgcttctgtctaacagctctggcggcagccctgcaagagaagccagcttttcaggagagtacagctgggattgatgcagcctttgtacaagacttaaattgtcacgcactgtcccgtcgagcacgggagccgattgaaacgcgagggctgccgttctcctcagctcattgacattccattctctgacttcctttccatatatgttgacttcgccgctgtcaggcgttctcattaaattacacatagaaaggagggtgcttttgcctgagccggaagggcctaaaacggctacgattgcaccctgttgaatgtctccggtgacatcctgcagcacatcataggtttgtccatcttgtttatagctttttctgactgatctgaaggagatggctggtatgttttgtgtttgatcgtttgcttccattacaataatcacctttcaatataagtaggctgacattatatttaactataacgtgaaacagattccttttggtagcacaaataaaggagaacaggctttcacccattctcctgcagatgctacgcagtcagatttgactgtgctttctttttcggttttctcggctgtgaagcgaaggtatgtaacatcatccccgctattataatgaacaaaccggcaaatgataatagagatgggaaaacgcctgacagcagaacaatttcaccaagcagcgcgaaaatcacttcaccggattgagtggcttcaacagctgcgagtttttgcggattgtctcttaccatatcagtagcccagaaaaataaaaccgtcgcaatgatgcctgagctgacggcaacgataaaggattgaacggtttgacttgctgttggaaggccatctgaccaccagccgtaagctgctaatataagccagaatggaaggcttgccaatgtcattccaagcacgcgctgaaatgtatcaagccggcctccgtattcttcgagcattctcctgtttcctaacggataggcaaaagccgcaatgacaaccggcagcacactgaaaagcagcatcctcccagaaagcgattctgcatgctgaagctgaatcagagccgctccaatcaggatgatcacggaagtgccaagtgaaaccaggggaatcttttggcgaacgagctgcggaccgcccggcatatcttgtttgacataaaacaaaggagataagagcaccccggctacaattgtaatttgccaggttccggctatgagccaccccggaccgtatgcagccgcaaatgtaatcggcgcgtaaaaaagcacgaaaccgacgaagctccatttgatccaataaaacggctttttcctcatctctagtaagagaggcgtgaatgtccctctcatgatgacaatcaaacataaaaatggcaccataaaaataaagcgcagcgaagagctccaaagccagctgcctcctgataactccatcgctctgtttaatataaaggtaacggcgaaaaagagtgaagccaatattccgataacgatagctttcatgatatccctcattctggcattatttttttatactatactattcggtatcatgcagatcaatggaatcatgagaaaaacatcatgtttggcgaactgctatgtgtggaagacaaaaaagggaggtgaaattgatggaaaaagagacacagacatacttctttccggatgacggcaggattccgaatcaccctgattttccgctcgtggtgtatcaaaacgcgcttaaggacactggactggcagagcggatcgtcatccggcatggctggtcaaacagctggtcagggagtgtttttccataccatcattatcacagcaatacgcatgaagtcctgattgcccttaggggagaggctgtgattcagtttgggggagaaaaaggggctgccatccctttcaaatcaggcgacgcagtcgtgattccagccggagtcggacataaaaagctcagctcaagccccgattttactgtccttggcgcctatcccggtggcattcagtatgatatgaagacgggaaagcccaatgagcgagaggaagcggtcaaacagattaagcaggcggcgttgccggcgaatgatccgatcacaggaaaaagagagcctctattggaaatatgggtaaagtgaaggggagaaattgctggattgtcaataactagtgccgcagaaacgatatgacatgtgctccatataaattaatttcataatcgaagcaattcacgttcaaattttgttcaaaaagtgttatcatatagaaggtaatcgaattggagttttttgtgtttgctattttcagagagagtaaaggattttgacttattcaattgtttatttttagataaaaataatactgaatatggcaagatgaaaaactgggtagtaaacatttatttttgtaaatgattgtgcacgaattcacaatccttattcttatgccttaaaagcgtgagacagggagaggcactaccctttccaaaaaaatcagcaaactgcttatagtaaaggagaattggatatgccagaaacaatcgatcaaacaaatgcgtctgtcagccaaagccagcaagatcttattgatcagctattaaagccagaagttcaagaatcattgactgttttagttgaccagcttccgaagctgactgagttagtcaatattttaacgaagtcttatgatttcgctcagtctgtagcgactgacgaagtgttaaaaaacgacacagtcggtgcgatcactgaaattcttgagcctgtaaaagaaacagcgaaagaagtagctgcgactgcgatcgaagcaaaagaccgcgcggaagcaagcaacgaaacaattggtcttttcggcctgctgcgtatgctgaaagatcctcaagctcaaaagttgttccgttttgctaacagctaccttgaagtcatgaacgaacgcgaaaaccaaaaataatctcagattcaaattgatataaaggacggaggatatacgatgtcaaaacatattgtcattctaggcgctggttatggcggagttctttctgctctaacagttcgcaaacattacacaaaagaacaagcacgcgtgacagtggtaaacaaatacccaactcaccaaatcattacggaattacaccgccttgctgcaggcaacgtgtctgaaaaagcggttgcaatgccattagaaaaacttttcaaaggcaaagacattgatcttaaaattgcggaagtaagctctttctctgttgataaaaaagaagttgcgcttgctgacggttctacattaacttacgatgcgcttgttgtaggtcttggttctgtaacggcttacttcggcatcccaggtcttgaagaaaacagcatggtattgaaatctgctgccgatgcgaacaaagtctttcaacatgttgaagatcgtgtgcgcgagtactctaaaacgaaaaacgaagcagatgcaacaatccttatcggcggcggcggcttaacaggtgttgagcttgttggtgagcttgctgacatcatgccgaaccttgcgaaaaaatacggcgtagaccataaagaaatcaaattaaaacttgttgaagcaggtccgaagatccttcctgttcttccggatgatcttatcgagcgtgcgactgcaagccttgaaaaacgcggcgttgagttcttaacaggtcttcctgttacaaatgtagaaggaaacgtaatcgatctgaaagacggatctaaagttgttgccaacacatttgtttggactggcggcgtacagggtaacccattagtcggtgaatcaggtctagaagtgaaccgcggacgcgcgactgtaaatgacttcctgcaatctacatctcatgaagatgtattcgttgctggagacagcgcagtttacttcggtccagacggccgtccatacccgccaactgcacaaatcgcatggcaaatgggtgagctgatcggttacaacctattcgcttacctggaaggcaaaacgcttgaaacattcaagccagtaaactctggtacacttgcaagccttggacgcaaagacgcggttgccatcattggtgctaattctacaccgcttaaaggtcttcctgcttccttgatgaaagaagcaagtaacgtacgttacttaacacacattaaaggacttttcagcctggcttactaatccttttaatgaatctgacattgccaaaagcgttccttaccgagtgctttctggcaatgtctttttttatgtttatgacagcgttaacatttcattttcaaaaaagagattgatcccagaggaatataaaggtaaaataaaaacaaatcaaaatgttaacgttaacattttgaaatagaatgaaagacggtgaggacatggaacccttcatgggcgaaacctttttattgaaaaatgaaaccgctgtcagcctctatcacaattatgcgaaagacatgccaattattgattaccactgccacttaagtccgaaagaaatctatgaaaataagacatttcaaaacatcacggaagcctggctgtatggtgaccattataaatggcgcatcatgagagccaatggaattgaggagacatacattaccggagatgcgcctgatgaggagaaatttatggcttgggcgaaaaccgtgccgatggcgattggcaacccgctctacaactggactcacttagaattgcagcgtttttttggcatttacgagattttaaacgagaagtccgggccggctatatggaaacggacaaatgaactgctcaaaggggaaggcttcggggcaagggatttaatcgtgaaatcaaatgtaaaggttgtgtgcaccacagatgaccctgttgattctcttgaataccatctattattaagagaagacaaagactttcctgtcagcgtgctgcctggatttcggccggataaagggcttgagatcaatcgtgaaggctttcctgagtgggtgcaggcgcttgaagatgccgccgccatatccattgcaacctatgatgagtttttaaaggcgttggaaaaacgagtgcgattcttccactcagccggcggcagagtttctgatcacgcgatagattcaatggtatttgccgaaacaacaaaagaagaagctggacggattttttctgacagattacaaggaacagaggtttcttatgaagatgagaagaaatttaagacatatacgcttcagtttctttgcggtttgtatgcggagctcgattgggcgatgcagtttcatatcaacgctttaagaaacacgaatacaaaaatgatgaaaaggcttggacctgatacaggctatgattcaatgaacgatgaagaaattgccaagcctttatacaagctgctgaactcagttgagatgaagaaccagctgccgaaaacgattttatattcactgaatccaaatgataactatgtcatcgccagcatgatcaacagttttcaggacggtattaccccgggaaaaatacaattcggcacagcctggtggtttaacgatactaaagacgggatgctcgatcaaatgaaagcgttatcaaatgttggccttttcagccgttttatcggcatgctcaccgattccagaagctttctttcgtatacgcgccacgaatatttcaggcggatcgtctgcaatttgattggggaatgggtggaaaacggcgaagtgccgcgcgatatggagcttctgggaagcatcgttcaggggatttgctatgacaatgcgaaacactactttcaatttcaagaagagaaagcaaacgtgtaacaaagtgtccgctcagtatcgctgagcggatcactatccgaaaattcttaagacacagaggtggaacatgcgaactgaactggcaaataaggttgtgtcggtcgaaacggaaaaaaggctttcattgaaagagaaaatgtcctatggttttggtgattttggcaatggttttatgtttgatctcggccagatttatttattgaagtatttcactgatgtagcgggaatccccgctgcgatggccggcggcatttttttagtcagtaagctgtttgcggcgataacagatccaattgtcggctcatcaatcgattatcgcaaaaacatcggcaaacgggggaaattcaggccttatctattaatcggcagcctcgtgcttgcggtgcttactgttcttatttttctgtctcccaatgtatcaacgactggaaaactgatttatgcatatgcatcctatatgatttggggcatcggctattcgtttgtgaatattccgtacggctcattaggggcagcgatgactcaaaattctgaggaacggacctccatttcgacgttccgccaaatcggatcacttggcgccttgtttatcacaagtgttgccgtgatgccgctgctcatcaagtttgataatccgaaggtcggctacccggtggtcatgggcttgttcgccgcactcggtgtgctttggttttatatttgctaccgcaactgcaaagagcgcattgtcatatcggaagcacccaaagaaaaattaacactctcatctgtcgtcaaaacatttattacaaataaaccgctgttaacccttgtcctgatgacgattttttcaatttccgcatacaacattaaatccgccatgctcgtctatttcgcacaatataacctgggcaatgttgaattaatggcttatatgaactttataattatcggttcttcctttttgggcgtcgtattccttccaaagctcgtcaagatgtttggaaagaaacgaacggcaatgatcggcttcggcatcagtgtggccgcggatctgatcaactttatgcttccatctaacgtttatgtgtttacaattctcgccagtatcgcctttattggaatcagtatcccaaatggcatcacgtgggctcttgtctccgatattatcgactatggcgaatggaaatccggtgaacggaaggaagcaacgacatattcacttttcaatttctccagaaagcttgctcaatctttgtctggctttctctcggggatcggtttggggattatcggctatgttccgaatgcagtccagacagcacaggcgctgattggcatcaaagcgctgcttcttctgtatccggccattgctttggcattagcgatgatcattatcagctttctttataaactcacagaccagcagcatgctcagatcgttcaggatcttcatcaaaagaactgacaatataatataaagaatatttaaaataatttgtaaataaaatgtgtttgtaggggtttcgctaggggagtgcccaaaaaactgaaaaggaaggaggcacttgtttgaaaacgataacaattgcagctaaagaagcaaaggaactcgttcggcaaaagctggccagtgccggtttgaatgaacgagatgctgaaaaagtagcagatgttctcgtgcacgctgatttgcgcaatgtacattcgcatggcgtgctgcgcacagaacactatgtaaacaggcttttagcgggagggatcaatcctggggcacagcctgtttttaaagaaacggggcctgtgaccggggtgcttgacggagacgatggtttcggtcatgtgaattgcgacatggcgatggaccatgcaattgacatggcgaagaaaaaaggagtcggcatggtcacggccgtaaacagcagccattgcggagcgctaagctattttgtgcaaaaagcggctgacgaaaagctgatcggaatagcaatgacgcatacagacagtatcgttgtcccgtttggggggaggactccttttttagggacaaatccgattgcttacggtgttccggctaagcataaaaaaccgtttatcctagatatggcgacatccaaagtggcttttgggaagattctgcaggcccgtgaagagggcaaagaaattcctgaaggatggggagtcgatgaaaacggagaagcagtaactgatcctgacaaggtcgtctcactttcaacattcgggggcccgaaaggctatggactatcgattgtggtggatgtattttcaggattgctggcgggcgcggcttttggccctcatattgccaaaatgtacagcggtcttgatcaaaaaagaaagctggggcattacgtttgcgcgatcaatccagccttttttactgactgggatacgtttttagagcagatggatgccatgattgatgaactgcagcaatcaccgccggctgttggattcgaaagagtgtatgtgcccggcgagatcgagcagctgcatgaagaaagaaataagaaaaacggaatttctatcgcccggagcgtgtatgaattcttaaaaagcaggtgagaaaaatgaaagcggttcaagtgcgaaaagcgtatgatctggtgacagtggaggtgaagaagccagttctttcaaaggatgatgaagtgctcgtgaaagtcaagcgagtcggcatttgcggttcagacatgcacatttatcatggaacgaatccgctcgctaccctcccgagagtcatcggacacgaggtaacgggacaagtgaaggaagttggtgcgaaagtacagagcctaaaacccggtgatcatgtggtaattgagccgatttcttattgcggatcgtgctatgcctgccgcaaagggcggccgaatgtttgcgccaagctttctgtatttggcgtacatgaggacggaggcatgcgggaatatattgtgcttccggaaaggcagcttcacgcggtctcaaaggacttgccttgggaggaagcagtcatggccgagccttatacgataggcgcccaggcagtgtggagaggccaggtggaaaaaggtgataccgtcctgatccagggagcggggcccatcgggatctgtgtgttgaaaatggcaaagctggcgggtgctgttgtcatgatgactgacttgaacgatgagcggctggcatttgcgaaagaaaacggcgccgatgctgttgtaaatgtccaagcagaacatgttgccaagcgggtccttgaatggactgggaatgaaggagcaaacgtggtcattgatgctgtttgcctgccggagacttttgcgctttcaattgaggctgtgtcaccggcgggacatgtggttgtgcttggatttgatgaaagagcggctcagatttctcagctgccaattacaaaaaaagaagtcacgataaccggatcgcgattgcagaccaatcagtttccaaaagtggtagagcttttgaatggaggccggttagtgcataacgggctggtgacccatacattttcagttgatgacgttcatcatgcatttcagtttattaaggagcatccagatcaggtgcgaaaagccgtcatcacgtttgattaaatgactgaatccggaggtgcgagcatgaatatgacattccgatggtatggaagaggcaacgatacagtcacacttgaacacgtgaagcaaattcccggtgtcaaaggcatcgtttgggctctccatcaaaagcctgtcggcgacgtgtgggaaaaagaagaaatcagagccgagaccgaatatattcaatcctatggttttcatgctgaagttgtagaaagcgtgaatgttcacgaagcaattaaacttgggaacgaagaacgcggccggtatattgaaaactacaagcaaacgatccgcaaccttgccggatttggcgtgaaagtgatttgctataattttatgccggtttttgactggacacgcacggacatgttccggccgctagaagatggatcgaccgctctgttttttgaaaaggccaaggtggaaagccttgatcctcaagagctgattcggacggtggaggatgcatctgacatgacactgccggggtgggagcccgaaaaattagctcggatcaaagagctttttgctgcctacagaacggtcgatgaagaaaagctatgggacaatttatcattctttttgcaggaaattcttcctgttgctgaggcctatggtgttcaaatggccattcatccggatgacccgccgtggccgattttcggactgccgcgcattatcacaggagaggcaagctataagaaactgcgggcgatatcagattcaccgtctaattgtatcaccctttgtacaggttcaatgggagccaatcccgctaacgacatggtggagatcgctaaaacgtatgccggcatcgctccattttcacatattcgcaatgtgaaaatttatgagaatggcgattttattgaaacatctcatttaacaaaggatggttcgatcaacattcaaggcgtgatggaagaactgcataagcaggattacgaaggatatgtcagaccggatcatgggcgccatctttggggcgagcaatgccgcccgggatatggcttatacgatcgggcacttggcatcatgtatttgaacgggctgtgggacgcttatgaagcaatggcaaaaaaagaggtgggcatatgatcccgctgcatgagaacctggctggtaaaacggctgtcatcactggcggcagcggcgtgctttgctctgcgatggcccgggagctagcccgtcatggcatgaaggtggcgattttgaatcggacggctgaaaaaggccaagcggtcgtgaaggagataacggcggctggcggcacagcgtgcgctgttgctgcggatgtgctggacaggatgtcactggagcgggcaaaggaagacatccttggccaatttggcgctgttgatctgttaattaacggggctggcggcaatcatcctgacgcgataaccgatgtggagacatatgaagaagcgggagaaggccaatccttttttgatatggatgagaggggctttctaactgtattctccaccaacttcaccggtgcgtttctggcctcgcaagtgtttggtaaagaactgctgaaggcggattcacccgcgatcatcaacctttcttccatgagtgcttattcacctatgacgaaggttccggcatacagtgctgcgaaagcatccatcaataattttacgatgtggatggctgttcattttgccgaaaccgggctgcgggtcaatgcgattgccccaggcttctttctgacaaaacaaaatcatgatctgctgatcaaccaagacggaacgttcaccagccgatctcacaaaattattgcgggaacaccgatgaagcgcttcggaaaacccgaggatttgctcggtacgcttctttggctggcggatgaatcctattccggttttgtcactgggatcaccgttcctgtcgatggaggatttatggcttattcaggtgtgtaacgaaagcggtgcaacagaaactgaaccaacataggggtgaggttgagatgttttcaaaagataagcttcccgttatcctttttttgttcctggcaggggtgattaattacctggatcgctcggcgctttccattgcagctccttttattcaggatgatctcacattgtctgccacgcaaatgggcttgattttcagcagtttttcgattggttatgcgatttttaactttcttggtggcgtggcatccgaccgctatggggcaaagctgaccttgtttgtcgcgatggttgtttggtcgctgtttagcggagcagtcgccctcgcttttggttttgtcagtctgctgattatacgcattctcttcggaatgggagaaggcccgctttcggcgaccatcaacaagatggtgaacaactggttcccgccgacccagcgggcgtctgttatcggtgtaaccaacagcggcacgccgctcgggggagccatttccggcccgatagtcggcatgatcgcagtggcgttcagctggaaggtatccttcgttctcattatgattattggattgatatgggcagtgctctggttcaagtttgtcaaagaaaagccgcaagagacgattaaggaagcaccggcaataaaagcagaaacgtctcccggagaaaaaattccgctcaccttttacctgaagcaaaaaacggtcctgttcacggcgttcgcttttttcgcttacaactacatcctcttcttctttttgacgtggtttccgagctatcttgtcgacgagcggggattaagtgttgaatcgatgagtgtcattacggtcatcccgtggattttaggctttatcgggctggctgcggggggatttgtttctgactatgtgtacaaaaaaacggcccgaaaaggtgtgctgttctcgcgcaaggttgtgcttgtcacgtgtttgttttcatcagctgtcctgattggatttgccgggcttgtggcaacgactgcgggggctgtcactcttgtcgctctgtcagtgttctttctttatttgaccggtgctatctattgggctgtcattcaagatgtggttgatcaaaacaatgtcggttctgttggcggcttcatgcatttcctcgccaacacggcaggaattatcggcccggctttaaccggatttattgttgaccaaacaggcacgttttctggagcatttttgcttgccggagggctggctgtcttcgcttcacttgctgtgattcgttttgtccgtccaatcatcggcaagccagcgggaacagaagctaagaatcctgtgtcttattaatctggaaatatagtgggagaggcggtatatttgatgatacaatatacagtaaataatcgcagccggtatgataaggaagggaattagatggtaaccataaaagatatcgcaaaactcgcaaacgtatcccacacaaccgtttccagagcactcaacaacagcccttacatcaaagaacatacgaagaaaaaaatattagagctagcagagcagctcaactatacaccaaatgtaaatgcgaaaagtttggcgatgcaaaagtcgcatacgatcgggcttttctttacaagcattacaaacggaacctcacacagcttctttgcagacacaatcaaaggcgtcaatcaagccataagtgaggattacaatctgtatgtgcgcggcattgatgatctgaaaaactatgactccgttacaccgatgagatatgacggcatcattttaatgagccaaagtgacattgataattcttttatttaccatattcgcgaaaaaaacattccgcttgtcgtgctgaatcgtgatattgatgatcgcaccatcacgaatattttgtctaatgacaaggaaggctctcaagaagctgtagaatacttcattcagtccggacatcaagacatcgccatcatcgaggggatcgaaggctttaaatcctcccagcagcgaaaggaaggctacttatctgcactgattcaacatcatattccgatcaagcatgaatacagtgtcaaaggacagtacgatatggaaagcggctttcaagcgatggagcggctgctggcactgccgaatcctccaaccgctgttttttgttcgaatgatgacatggcaatcggagcgatgaatgcgatattcgcaaagggcctgcgcgtccctgatgatatttcggtgatcgggtttgatgatattggtttttcacagtacatcacgccaaggctttcaacagtaaagcgcccagtggagaaaatcagcgtgcttggcgcgcaaaaactcttgtctctgatcagcaagcccgaaacaaaagcagaaaaaatcttggaaaacacagaatttatggtgcgtgattcagtcaggcgattgacgacgtgatgtcccgtttttcagcgggcattctttatacagaaaaatgttaacgtgtgcataaaaggagagggaggcaatacgggtgcagaagctgaataaaaatgtgtacgatcactatactcagtatccagaaaaaattctccagttcggagaaggaaactttcttcggggatttgtcgattggcagattgatcaattgaatcaacacactgattttaatgggagcgtggcagttgtccagccaagaggctcagaaaaaatcaaacgattaaatcagcaagatggattatatacgctttttttacaaggaatgaaagacggagaagcggtaaacgagcatatgattatcaactcaatcagccgggggattgacctgttttctgattatgaagcatacaaagaattggcatcaagcgaaaggcttcggtttattatctccaacaccactgaggctgggattgtatgtgatgaaaaagatcgtttagaggataggccgcaaaaaacattccctgggaaattaactgcatttctctacttccgctatcaggcttttaaaggagatcagacaaaagggtgtgtcctaatcccatgtgaactgattgagaacaacggcgaaaagctgaaggaaacggttcttcattatgcaggtctgtggaagctggaggaaggatttacacagtggattcatgaggccaatacattttgtaatagtttagtagaccggattgttccgggttttcccgtcgacagcattgatgagatcacggcggatcttggctatcaggatgatttgatagttgtgggagagcaatattatttatgggttatcgaggggcctgattggattggaaaagaacttccctttgcggctgcagggctccatacaaagatcgtcagcgacctcaccccataccggactaaaaaagtaagaattttaaatggcgctcatacagcaatgacgccagtggctttattatacggcttgaagactgttagggatgcagtcgagcatccggaagttgggcgatttataagagagctgattgatgacgaaattcttcctgttttaaaaatggaaggtctttctcagtatgctgacgatgtgctgaaccgttttaaaaacccgtatattaagcattacctggaaagcattgcattgaacgccatttccaaattcaaaacgagaaacctgccgacacttaaggaatatgctgaacaaaagggacagcttcctgaacgcttggtgttttctttcagtgctcttctgtatttttatcataataatgagacattgcaggatgatccggcagttcttcaatttttcaaagaggtttggtgtcaggaggatggcgacatgcttcggattgcatcaagagtgttaggcgaacagtggctgtggggggcagatctcaatgagataccgaagctgactgatagagtcgctgtttacttgaatcatattcatgagctgggcatgcagcgggctcttgaacaatactgcatacaagggggagaggtacgttgaagtcgtttataaagattcataagcaagataatgtccttcttgctctgcgggatatccaaaagggagagaggctgcatgcggacagcgtgtcgattgaagtaaaggatgatataaaaagaggccacaagattgcattgaagcctattaaaaaaaatgacagcatcatcaagtacgggtttccaatcggtcatgcatcacaagatatatcgatcggagagcatattcatgtccataatacgaaaacaaacctgtctgatatccaatcatacagctatacaccgagatttgatgaaaatccgtattctaatgagaaccggacgtttaaaggttttagaagagaaaacggagatgcgggtgtacggaatgaattgtggattgtcccaactgtcggctgtgtcaatggaatagcagaaaaaatgctgcagcgttttgtcagagaaacaggggatattgctccatttgataacgtactggtgttaaagcatcaatacggatgctcgcagcttggcgacgatcatgaaaatacgaagcagattctgctgaatgccattcgccatccaaatgccggcggcgtcttggtgttagggcttggctgtgaaaacaatgagctggcaagaatgaaggaagcactgcaagatgtgaacttgaagcgggtgaagtttctggaatcccagtcggtgaccgacgaaatggaggcaggcgttgctttgctgaaggaaattcatgaagcggccaaagaagataagagagaagacattccactgtctgaactgaagatcgggctgaaatgcggaggttcggacggtttttccggcataaccgcaaacccgctgcttggacgtttttcagattatctcattgcacagggagggagcacggtgctgacggaagttccggaaatgttcggcgcagaaaccatcctgatgcagcgggctgccaatgaagaagtgtttcataagatagtccaattaatcaatgattttaaacaatattttatcaaacatgatcagccggtgtacgaaaatccttcaccgggcaacaaagcgggcggcatttctacacttgaggataaatcgctgggctgtacgcaaaaagcggggatttctcttgtcacggatgtcttgaaatacggggaagtgctcaagacaagagggctgacgcttttgagcgcgccgggcaatgatttgatcgcctcctccgcattggcggctgccggctgccaaattgtcctctttacaacgggaagaggcacgccgtttggcacctttgtcccgacggtgaaagtagcgacaaacaccgagctgtatgaggcgaagccgcattggattgattttaacgcaggtcttttagcagaggatgatgttcatgaggaatatgtgctgcgtgagtttatccactatatgattgaggtggcaagcggccagcttgtgaaccatgaaaaaaatgatttcagagaacttgccatttttaaatcgggtgtgacgctataataagaaaaggctatccttcaagcggatagccttcttcattaaatcaattttaaaccgctgactaaaataatggacgccataataaattgcagcggacgcggggagaatcgaggcgaaagatggctcccgatcagcacgccgggaattgaaccgaggagcagattagctgccagcatgtaatccacgcttccgaagcttgcgttcaaaatgcctgctgccgtaacaagaagaaaagcatgcgcgatatcggttccgacaatctgtgacgctttcatgttaaataagtaaatcatggcaattgcaaataatgagccagaaccgattgatgttaatccgacgataaacccaaacacaacaccaataagaattgtcagcgccctcttattttcaagcggcatcagctgccagcggttggggcgaagttttctatccaaaaacaaacgaacgatgattgaaatggcaaccagcgttaacacatatcctagagcgtgcttaataatttcttcctgatgctggtgaaaggcggggaacaaatgcaatatgccaatggctagcgaagcactcggaatactgccgatggctaagtattttaccaatttaaagttaatcgttttctgccgccaatgggaggcaacgccaaacagctttgtgatcgagttatatacaagatccgtaccgaccgcgatggaaggattaattccaagcacaattaaaaggggagttaataaggccgctccacccactcccgtcaatccgactaaggctccgacaaacaaacccatcaatatgatgcttacactcatgataaaggcctcctgaaaacccgactatttttatcagattatatatgattaggacgcgttaatcaattaaattttttgaatttttgcacgttagctgcttgaaattttggtatgctcaatatctctattcatttgccctataatgagtgtctggacgaaatcgagaagtactaaaggcgcaaaaaaaagatacctcttaacaggtatcttttttcttgtttacgctacatgcgctgctgatagaaaggaagctcagtgtggcccatttcccgcacatacacgaacaggttgcctttatggtgaatttcatgctccattgcaagctgaagcagcgcgcggcctgtgacttttctgccgaaagcggatgtcagatcaatttctctgtccagctgctcttcagtcagctgttcaaggatagcggccgttttttctgtatatgtttttgccagaacattgagatctgtttctgtttcctcctgcttgttttgaaatggtgaggcattgccttccttaatgacatttgcgaacaagtggaaagacgtaagaatgtgtttgaccagttcttctgctgacattgatgtttctgccggtttgtagctgtaatggtctttgctgattttttcggcaagctcattggtcacgtttcgatgggataaaaaatggctgacaatttgattggattggctcattatgatctcctccatatgtaaaaataaatggtgcaatgaaatcctatatcaacggttatgaattcacaagtaatatgctgtgggatgaaacaaaatgctatgtcaatcgtatatataacgttcacaaaacatgaaatggagtataaacatgactaacatacctttcatttatcagtacgaagaaaaagagaatgaaagagctgcggcgggctacggcactttcggttaccttatcacacggattgaagaaacgctttatgatcaatacggtgtattctatgagctctatgccagtgatgatccaaatacggaatactgggagcttcttgtagaagatgtccgcagcggttcattggagcctgagcatgtggcatatatatttgaaaagcttgaaaagaaaacctttgcttacgatgaagatgagaaagaaccggattataccgtccataagtctataagaaacagtgtatacgcgtatcctgaaaagggagttgcttttgccagaattccatattttcaagatgggagcattatgagttttgattgtctgtttgcggttaacgatgaaaagatgcgtgcatttctggagggagtcagaccgcgtctttgggaaaaaagcaagcggaaagtgaccgtgtttacggatggagatggagggacttcaagagagcaggaagccattgtcagagaggttcagcggagtcaagtcatcatgaatccgctattgaaaaaagagatatacagatcaattgatcagttttttcatagtgataaatcgttttatcaaacatatgacatcccttacaagcgcggcattctgttatatggacctcctggaaacggaaagacgacgttagtgaagtcgatcgcaggcagtatcgatgcacctgttgcttattggcaaattactgaatttacgtcgagcgagacaatagaagaagtctttcaggcagcgagacgcctcgctcctgcagttctggtcatcgaggatatagattcgatgccggaagatgtgcggtccttttttctcaatacgctggacggcgcgacatcaaaagaggggctatttctcatcggtacgacaaactatcccgaagagatcgatccaggtttgatgaatcgtgcagggcgatttgatcgtgcctatgaaatcgggcttccggatgaagagctgcggctggaatatatgaaaatgagaggctttggcatctttttgagtgaaggagaaataaaaaacgccgcaaaacttacagaaggcttttcctttgcacagctgggagaattatatgtatcttcagcccttcaatggcaccaagaagggaatcaccatattgaaaccatggtgaaagacatgacaggagagcaaagaaaaagccagcggggaagctggatggaaagaaacaaagtcggttttcactaaaagaaagcacgggtgtttgaaaaacccgtgcttttttgttgcggttagccgaaattcgacaattgcggttattttgcgttcttctttttcttgcaaatatgataaaatatgacatatctcgggtaattcaaaaaggggggattaattgaggatgaagcagacgattccgtcctcttatgtcgggcttaaaattaatgaatggtatactcatatccggcagttccacgtcgctgaagccgaacgggtcaagctcgaagtagaaagagaaattgaggatatggaagaagaccaagatttgctgctgtattattctttaatggagttcaggcaccgtgtcatgctggattacattaagccttttgaagaggacacgtcgcagctagagttttcagaattgttagaagacatcgaagggaatcagtacaagctgacagggcttctcgaatattactttaacttttttcgaggaatgtatgaatttaagcagaagatgtttgtcagtgccatgatgtattataaacgggcagaaaagaatcttgccctcgtctcggatgatattgagaaagcagagtttgcttttaaaatggctgagattttttacaatttaaaacaaacctatgtttcgatgagctacgccgttcaggcattagaaacataccaaatgtatgaaacgtacaccgtccgcagaatccaatgtgaattcgttattgcaggtaattatgatgatatgcagtatccagaaagagcattgccccacttagaactggctttagatcttgcaaagaaagaaggcaatccccgcttgatcagttctgccctatataatctcggaaactgctatgagaaaatgggtgaactgcaaaaggcagccgaatactttgagaaatctgtttctatttgcaagtcggaaaagttcgataatcttccgcattctatctactctttaacacaagttctgtataaacaaaaaaatgacgccgaagcgcaaaaaaagtatcgtgaaggattggaaatcgcccgtcaatacagtgatgaattatttgtggagctttttcaatttttacatgcgttatacggaaaaaacattgacacagaatcggtctcacacacctttcaatttcttgaagaacatatgctgtatccttatattgaagagctggcgcatgatgctgcccaattctatatagaaaacggacagcccgaaaaagcactttcattttatgagaaaatggtgcacgcacaaaaacaaatccagagaggagattgtttatatgaaatctaaatggatgtcaggtttgttgctcgttgcgatcgggttcagctttactcaggtgatggttcatgcaggtgaaacagcaaacacagaagggaaaacatttcatattgcggcacgcaatcaaacatgatgcataaaaaaagacccttaggggtcttttttatttcttcagcttccattcttttatcgtcagctcagaagatccacttgccaccagcggatccgcatggccgatttccgctgcctcttccagtgaatctgcttcgatgacatacgctccgcctgtggcgtcgctgaatggcccaaacatttttaaacgtttttctgcctgtaaacgatccagaaattcatagtgcccagccacatgctcctgattaaatttctccgttctcattgtcagcattaaatatgtatacatattcagaccctccgtgaacttcagtttaacacatttatccatattacagtgatagatgatatgagcttttcgtcctacgaatgccacctatttatgaaaaaagaaaaggagagatgataggtgagcattccagtaaagaaaaatttggtttctgaggcgaaatacgcgttgaagtgtcctaatgcaatgtccgctgaatacattaccattcacaacacggcaaacgatgcgtcagcggccaatgaaatcagctatatgatcgggaacacaagctcgacaagctttcattttgcagtcgatgatcaagaggtgattcaaggtctgccgcttaaccgaaacgcctggcacacaggtgacggcacaaacggtccgggaaaccgcaaatcaattggcgttgagatttgctacagcaaatcgggaggcccgaagtatgaggcagctgaagccttggcgatttcatttgtagcacagcttttgaaggagcgcggctggggcatcgatcgggtgagaaagcaccaggactggaacggaaagtattgcccgcaccgcattttatcagaggggcgctgggatcaagtgaaggcggcaattgaaaaggaattaaacgggggcgtatcagctaaaaaagctgcagtctcttcttcagcgtctgaatatcatgtgaaaaaaggcgacacattgtcagggattgccgcatcacacggagtcagtgtgaaaacgctgcaaagcatcaatcatattactgacccgaattacattaaagtcggacaagtgatcaaactgcctcagacggcatctgcttctaaaagccatgccgcatcctcatatccgctcccatcaggcgtgatcaaagtgacaagcccgctgacgaaagggacaaaagtaaagcaggtgcagaccgctttagccgctctttatttttatcctgataaaggagcgaaaaatcacggcgttgacggcgtttatggcccgaaaacagcaaatgcagtgaaacgttttcagtctgtcagcggtttaacggctgatgggatttacggtccgaaaacgaaagcgaaaatggaggaaaagctgtaaataaaaagacggaagctgtgaagcttccgtctttttatcttacatacaaactgcggcaagcaccttttgaatatcataaatgctctcatcttttttaaactgctttgagacggcaggaagttctgcgccggaaatccaaattttcagttctgaatcgaggtcaaagcggccggccgtttccacgctgaatctggaaatgcttttgtacggaatcgattgaaattccgttttcttgcctgtgattccctgtttatctacaaggataagccgcttgtcagtaaagacaatcaaatcgcgaaccagcttaaacgcggcttcaacattctcaccctccagcaaaatatgggcaagctcttctttcacagcagccgttgacagtgttgacgcattgccgagtaatccatcaataaaccccatcatatacctcctcttcgtattctatcaaatcatactataaaaaaggttttcattcatggatgagtagagtaaacttgtgctgactggtaaagggggcgttcaaaatggaagatatgtatgacagctttgcagccctttctgcttctgagtcggagtatcggattatttatgaggagaaaaacggaagtgagcttattgtcctcggtcctcacggcggcagaattgagcctggcgtcagtgaactggtgcgggcattttcggatcgatgttccatctatttgtttgagggtctaaagcagcgaaacaaccgttccttgcatctcactagcattcgttttgatgagccgctggctttagaaaaagtgaatgaccaccattacgcattagcgtttcacgggtattatgatccgaaaatcccgcatacattggtcggggggcggatcgtaaaaaagccaagctcatttgtgagcgtctgaatgaagcgggttttagcgccgagctcaccaatgagaaagaccgcctggcaggtgtacacccaaacaatattgtcaatcggacgaaaagagaaatgggactgcaattggaggtaagcacggcacagcgaaatgcgctattccgcaattttgggtgccgtgataaaagctacatacaaaacgatttgtttgatcgatatgtggaagccgtcaagcttggcttttataaataaaactagacgggacctgcacggtcggcctattccttcatacgctggggttgtgcgaaagtgtggggaggaatgattcatgttttatcatataaaagagcttcaatatcaagcaaagccagctcatcctgatccggtttatgcgaaaaaacttcaagaggtgctcggcggccaattcggtgaaattagcgtcatgatgcagtatttgtttcaagggtttaactgcagggcggatactaagtatagagatttgttatatgatgtggggaccgaagagattgggcacgtagaaatgctggcaacgatgatttccagacttctggacaatgcacccgcggatgtacaggaggatgcttataaaagcaatcccgctattgcagcagtcatgtcagggatgaatcctcagcacgcgattgtgtccggattgggggcgatggcatcagatagtgagggctatccgtggaatgcaaaatacattatctcaagcggaaacttgctggccgattttcgcgctaacttaaatgcggaggcccaaggacgccttcaggtgacacggctttatgccatgaccgatgatccaggggtaagagatatgctgtcatttttgattgcaagggatacctatcatcaaaatatgtggtatgcggccattaaagagctggaggaaagagaacgggatattgtcgtcccgacgacgtttccgcgtgagctcgaaaaacaggaagtctcctatgacctgtttaatttttccaggggggatgaaagctcacaaggaagatgggcacatggggaagcctttgacggccggggtgaattcaggtatatcccggctccgattgcgttcgcatctgcgcctcatcttaaaccggcgcccatgtggctgcataatacagttcccccaatgtcgaaatgttaggttctcttctgggctgaggaatatatcctcagcccttatttgatcagatgtttttgccaatatgatataacgctttttcctcagcgacctgcaagtgctgttgatcgccttcctcgtacgcatgtggccgcttgtgagataataaataagcgagccgcttctgaaattgaatacctgctttacgccgttcaaacatgtcaagccttttatcagcaaattcctttgttacccggaataccgccgaaattgtggcgagtgcctggcttctccattgcggcagttccatctgcaacagcataaaggttggcacacagaagtggtacataaattgatttgcctggaattcttgaagctctctgaagagcttgttcatctgaaaatgattgcctgcatgctttaacacgtggcacagctcatggccaaaatcctcccattgctcttcccgtgactttttttggtttaatacgatactatacatgccgtcgtatttcaccatcatgctccccatatcctcaaaatgcacccgaatatccagatcctttgcgattttcagcatgtcaatgtgatgaggggatgtgatgcccagccggccgtataaatttttaacgtattcctccagatgtgataagtaatcgcccaattgaatactccctttcgaacatttgttctatttttagcgagaaagaaaagcccgtataggactggaaagtagcgtagaaatctttcccttttctttaaaaaataaacacttttttctttatatcggtctactttttatatgttttagagaacagagaacgatttatttatttttcggtttgcggtttttctctttttcttttaaatagttgataaattcgatggcctgctgtttgctttctggggaaaaatcctgcatatcgcggtatgcaagctgcaggtccggatctgagaacatatcgtcatcggattttttgtctttccccgttaataagtaatcagtcgttacttgaaagtaatcagccagcttttggagtgtgtcgtaatcaggttcgcttcgcccattttcatagtgggaatatcgtgcccgtgacacaccgatgtgtgatgcgatctcttcctgtgtccttttccctctgagactcttcaatctgccgcctatcatactatgacctctcttttttaaactccctacgttacttatgattatagatacaaaatgtatcaaaataaagttatgataaaaaaagtatcaaaaataacttgatgatacagattgtatcgtttatacttggtaacatccgatacaaaatgtatcaaaaaagatcaggagagtgatcacatgtatccgatccaaatcgtttttagtgaaaatcccatagatcagcgccatctcggacaatccggcggcaccatttcgtttaccgcatgcggccttccggtgtttcactttgaaacgcaggaacagtttcaagcatacatgatgttaaaaggagaagcggcgtacaatgaaaaacgataaaagctatccttttccgacgtattcagggttattgaattcagaacattatgacaaaattggcccggcgttatggctgtttctctggtttatcagctcaacaacaaaagaaatcgaaaaagacggcgtaagctggggcatcgtactcggccataagccgttaaaagcgagagaaatggcggcagtcttcggcgtaagtgaaaaaaccgtcagaagatggctggagcttctcgaaaaccatgattacataaaggccgtccgtgcgccatacggactgatgatttcggtcaagcattccaaaaaattcagcttcagatcggacaatactgtacacgggagtctaaaagaacggccattttcgccgcagacaccggacacaaacgaccgtacagatatagataaaacaaacaaatatactgctgctgatgatgcagtggatcacattgcgaagcggtttacacaattacggtcggctcaagaaggacgcaccgtgtatccttcctcaagagattatcaagccatcgcccgcattgttgccattggcgttcctgtcacgcaaacaatcaaatggcttgaagaatgctttcaggcttttgaaaaccggcggaccgccgcttctgaaacaatcaaggcttttcgctactgctcgaaattcattgaagatcgatttttcgcgcagcaagccaaaaagaatgccgcaattcagcatgagaggatgaaaaaacatgacaaaacgaacaatcgaacagattttggacgagctgagaagagggagacgtccattactggcggacaaaccggccgaatcagacgcaagcaggtatgattgcctgcgctgcaaggatcagggaggttatctcgtcagacagaatggcctggaagtctggacgatgtgcagctgcatggcagaacgaaaagtgaagcggctgctgggtgcaagtgagattacccacgctttcagacagctcggcttcaaggaattccgcacggagggaaagccgcaggccataaaagacgcattggagtgtacaaaagagtatgttgccgattatgaacaaatcaaggattgccgaaaaaacagcattgcccttttaggacagcccggatcagggaaaacacaccttttgaccgccgcagccaacgaattaatgagaacatgctatgtgcctgtcatttattttccgttcgtggaaggctttactgatctgaaaaatgattttgccctattagaagcgaagctgaaccggatgaagcaggcggatgtgctgttcattgatgatctgtttaaaccggttaacggcaaaccccgcgctacagattggcaattagagcaaatgtattcggtactcaattatcgttacttaaatcataaaccgattttgctttcaagcgagctgacaattgaagcacttgtacgggtcgatgaagcgctcggcacgagaatctatgagatgtgcagtgactatttagtgattatcaaaggagcagcctacgagcttaaccatagattggagggcgtcagataatgtgcaagctttgtcaaacaaagaaagtcattgtggaacataccggtattggggtcgtttttcatccatgtccgaactgtcggtccggtactgacttaacgcctgtcattcaaaagctggagcaaatgctgacagcgggaaaagcgaggctgaatatctatgattaaacagctgactgcactaatcgctttgctgtttcgggcaaagcgaacagaaaaaaacattgaacaatggtataaggacgacgggaagtgaaagtgttggaaaaaacaaaacagacagagaaaagccctgcgccgtggcgtgctgtcccgtgcggggatacgaaaccgatctatatttattcagcttacagtgaagaagaaaaagaaagattcccatattcaaacggacggctgattgccgctgtatttgaccttagctcttattcgcaaaaaagcaatgccgctttgatggccgctgcgcctgaattgctggaagcgtctaaagcagcgcttgattttctgaaagggaattctgttcattcaaaggagcgcatcattcagctattagaaaaagctgaagcaagcgctgcaccgaaaaggggaggaaataaaacatgattcatcctaaaaaactgctgcatatcgattccgtcacgcttaagagccagctggaggacgggaaaatccgtgtcattattgtggatggcatcaagcaagaagcatggatcacagaagcgcccgagcatggaaaaacgctcgtcgaaacaagaaagggcgaccttgcccgagtggaatttgaaatcggctacaaattaaattaaagcgaaaacagaatacgtccaagacggaaagcctgcggacactgatcaactgcacagcatttgtgcgttgattggtgtccgttttttatttgccaaaaatgaggaggatcatagaatgcaagacttactatttgaatataaacgaacgctcaaacaaacaagaaaccaatataaaccgctcgctgaggcagatgaatccgtgctctcagctgaagagctgaaggataaaaaaatcatcagaaatatgattactgatcttgaatatgtaacagaatggcttgaaaaaggaaggcagcccggcatcagacgggcgattgaccggcgtgatgcttaccagcggctgatgatcaaggacccgagaatcatcgaatcattttccagcgctatgatgtttgagccggacggacaggtatcagaagaagacagagatagaattcgagaagcattagccctgttaacggacagagaaaaggaaatgtttttgctgcataaggtagaatgtttttcttatgaacggatcgccgatcttctcggcgtaaaaaaatcgacagtgcaaacgacgattaaacgggcgagtttaaagatgcaaagacagcaggaagacatgaatcgatcacttgcctgaaagcttgtcatacgtttgccacctataagtgaatagagcatgacacataagcggctggctgatcagccgcttttatgaataaacaaccatgctggaggtggcggtgatgccgtagcatgaaaacacaacttcgcgaacaagcattagcaatctatcaacaacatcaaggaaagatcacaaatcgggcgatcgcggacacaatcggtgtttccccgaaaacaatcggcatctggaaaaaacaagacaaatggaaagaggccctgttttctgcgtccaaaaacgaacaaaaacagcgccctatagacaacgatgaattaaatgaacgccagcggctgttttgcctgtattacgtcaaaagcttcaatgccacacagtcagcaatcaaagcgggctattctccggacagcgctcatgtgacgggcagccggctcttaaaaaacgaaaaggtcgctgctgaaatcagacgcataaaaaaagaaatggtcaatgaaatgtttattgaagcgatggacgtgctgcaggtttatatcaagatcgcgtttgcggatattacggactatgtgaccttcggaaaaaaagaggtccaggctgtcgggaaatcgggtccgctgtttgatgaagatgataatccgattatgaaggaaatcagctttgtcgatgtcaaagactccgggctcgttgatggcaccattgtaacggaagcaaagcttgggaaagaaggcattgccatcaagcttgcagataaaatgaaggcgcttgagaagctatccttatattttgatttgtttccagatcaatttaaacaaaaaattgaaaatgagaagttgaagcttgccaaacaaaaagcggagaaaacagatgacagccaagagccgattgaaattatgatcaaacgaaaagagggcaagtcatgattgtaaaagaaatcaaccctcatttcgaagattacgtgttcaattgggagcagacgtaccaatttctcgtcggcggctacggctcatccaaaagctatcataccgcattgaaaatcgtgctaaagctgctgaaggaaaaacggacggcccttgtgatccgggaggtgttcgatacccatcgggattcgaccttcgccttgtttcaagaggtgatcgaagagctcggtctcacaaaggctgtggcatctctttcttccccgctgcagctgcgatttcacaatggcagccggatcatgttcaaaggaatggacaatccggcaaaattaaaatcggttcataatatttcattaatatggattgaagagtgctcagaggtgaagtatgaggggttcaaggaattaatcggacgtcttcgccatcctgagctgaagcttcatatgatctgtaccaccaatcccgtcggcacctccaattggacgtacaggcatttttttcgggacgaacgcaataaacggtttgtgctggatgacagcgaactttacgaaaagcggacaattgtgaagggagatacgtattaccatcattccaccgctaacgacaatctttttctcccagaaagctatgtgaaacagcttgacgggctcaaagaatatgatcccgacctgtaccggattgcccgcaaaggaagattcggcgtcaacgggatcagggtgctgccgcagttcgaggtactcccgcatgatcaagtaaaaaaatgtatcgcagccatcagcaagccaatctttcgtacaggtatggattttggattcgaggaatcctataatgccgtcgtccggcttgctgtagatcctgaaaaaaaatacctctacatttattgggagtattatcaaaataaaatgacagatgataggacggctgaggagctgcgtgagtttattgagacacaggaattgatcaaagccgactcggctgagccgaaaagcatccaatatttccgccagcagggctttcggatggttggagccagaaagtttcccggctccaggcttcaatataccaaaaaggtaaaacggttcaaaaaaatcttctgttcggaccgctgtgaaaatgtcatctatgagctcaagacacttacgtatgccaaagataaaaacggagctctgattgaggatgaattcacgattgacccgcatacgctttctgccatttggtatgcgcttgatgattatgaggttgctgatatgaaagagacagcacacaaacgaatccggccgaaccgagaaaggaggaggtcataaatcatgcacaatcaaacagtcagagcaactgtatttaaagccaatgccgaggctcctcagacaaagcaaatctatgaggatgacttttctgagctgtacggagaggacattatcgctccgccctacaatatcatcgagctcaaaaccattgccgaatactcgaccattcttcagcaatgcattgatgcgtacagagtgaatattacaggctttggattcgatgttgagtacacatttgatgtcaacgcaagtgatgtcgatcaggcaaaaaagaaaagagcggaaaaagactgggccagactcgaagccttttataaatgtcttcactttgatgaatcagctgaaatgattttaggctatgccatcgaagacagagaaaaaacaggcaacggatttatggaagtgcttcgcgacggggcgggaaaacctgccggcatcgaatatttagatgtgaaatatatgcgtgtatgcggagcaggcgagcctgtagaggtttcatttgtatatgaagaaaacgggaaaatgaaaaggatcaaaaggcaaaaacgcttccgaaaatatgtgcagatgatcaatggaaagaaagtattttttaaagaatacggcgatccgcgaaaaatggatattcgcacaggtgaatatgtaaacacattggcagagaagtatcaagcaaatgaagccattcacctcaaaatcggaagcggcgtatacggtgtaccccgctggatcggcaatattgtcaatttatacggggcccgaaaagcagaagagctcaattttatgtattttaagcaggggcgtcacgtccccgctgcgattacagtggaaaacgggatgctgtctgaagcttcttaccgggagctgcaggaatacatgaatgatcttgaaggcgtggagaacgcccataaatttctcctgatcgaagcggaaggaatcgcaaaagaaaaggatctccacggaggcgaggatattacgccggtttccgtggaaatcaaatccttggcggaaattctccaaaacgacgccctgtttcttgaatacgatgaaaaaagcagaaataagctgcgttccgcgttccgcctcccgccgctgtatacaggcgaggcccaggaatacaaccgggcgacagctgatactgctagaaaaattacggaggagcaggtttttcagccggagcgaaaaacgctcgtgaataaactgaacacgctgcttttgccggagctgaatatccatgacgtcaggctgacattaaaaggaccggactttcgtgatccgcttgagattgcgaaggtgctcggtccttttattacagccggagcagtctcaccgaatgatttacgtgaccttgccggacgggtgcttggaaaaacactggaggagtggccggaggacatttataaacggcctgcaggacaggatgcggaaaagacaaacctgactgcgctcatgcaggagttgaaagaaagcatcgaagatatcaaaacgtcctgaagggaggtgaatcaagcaggtggcgcgagaattaagaaatgccaaaatcagctttgtcagttatgtggacaaggcggctaaccagacagaatttttctttacgaagtcagccaaacctccgtcatttgaaaaaaaggttcggctgtttacaaaaagtgagcaggatgaacaaaagctcgtgtacggaatcgtgtatgagcctgatgttcctgatgcccacggcgattttatgaccgccgaggaaattgaaaaagcggcgcacggttttctcgcggaggcacgggagattgatatcaatcacagcttcgagggcggaaccggcgtcgtggtcgagtcctatgtggcgcccgatgattttatgatcgggtcaaagcggattacaaagggctcatgggtgctcgtgacaagagcgtcagacgaggtgtgggaacagatcaaggctggaatcatcaccggctacagcatggcgggcactgcagatgtatatgaggaagaaccggttgaaaaagcgggattcttcagtgtattcaagcaaatgcttgctgacaaaacagggaaggagactgaagaaatgagaaaagaagacatgaaagaatcattcgagcatgcgctttaccctctgctcaaacggcttgagcggattgaaaaaaacacagacacggaggaaaagccggagcagacgggtgatgacgagcgtctgaaaaagctcgttgaagacatgcttgccccgctgatcgaacgcatcgaggctttggaaaaagcgcgaggcgcgtctaagcagacagcggacgatacgggcggcaatacagagcaagtcaaaaaatcaatctggagcggactgctgtaaaaccagtcaaggaggaggaaatcaattgagaaatcaagagatcattcggaaagcggaaatgtcgctttctgctttaaaaagcggcgggcttatgaaccctgcgcaagcatcggcttttatccgcatggtgcaaaacacgccgaccattttcagtgaatcccgcgtgattcaaatggaaaatgactcgcaaaaatttgagaaaatcggcttcggccagcgtattctgcgggctgcgcaagaaggaaaagcactgtcaaacgacgagctgacagttccaacgacaagcactgtccagctgaacacgaaggaagtcattgcggaaatcaacattacgtatgacacacttgaaaacaatattgaaaaagacggcctgcagcagacgatcatgcaaattttagcagagcgcgcagcagttgatattgaagagctgatcgttaacggcgatacagcatcagctgatccgtatctggcacagctggacggcatccgcaaacaggcggtttcccatatcgttgacatgaacggtgaagaactgtccagagcgacatttaagaaaggcttaaaggcagttccgccaaaatatttgcgcatccctcaggaattcagattctatacgtctcacggcttagaagttgaatggaaggaccgcgtggcagaccgccagacaaaccttggggaccaggctgttcagggcggcttgtcaacagcattcggcgtaccggtcaaaggagtatccaatattcagccgtacacagtcggtgagggagacgcgcaatatgacgcttctgatatcattctcacacatccgaaaaatatcattctcggcttctcccgcaatatccgaattgaagtcgacaaagacatccgctcccgtaaatttattattgtcttaacggccaagctggacagcaagttcgaggaagaggatgcctgcgcaaaattaattaacgtaaaagaataatagaaacgaggtggtcagctcatgctcattgaaccgactgacgtagcctcctattcggtctatgatcgggtgaaaaacaggccggaagagctgctggcgcaggatatcatcgaggcggaagcagaagcggctctcatcacgggccaccgctttgaagacagcttgtatgatccgctgcccggcaaggtgaagttggctttagtaaagcttgcccagtattttgcgcttgtcaacagcgatgaatctgcctcatcaagctatcagtctgagaaaatgggggattattcctacacggtttccggagaaggcggcattcagcggccagaggtatatcatttgctcgaggagtttatcacgccgggctacgcccctgaatcctccagactgaaggtgaggtctttatgagctacaggcagatgctcattcatcgctgcgacatttatcatgaagcagcgcaagcgccgtctgcaggccgatttgggattccggcagacaggctgcagccggtgatttcatatccggatacacccgatgaacaagatgtcccttgttattttaccgaaaaaacgcagcagctgattcaggaggagccggatcaaactgtatatcatagctttctcgtccattttccgttgtcagcggacatccgcgtgaacgataaaatcatttgggagaatcataaatatatactaaagctgccgaaaaggatcagacatcatcattgggaggtcgtcgcagtcagggatgaaagcctatgaaaatagcgggattgaaacagctgaacacggcattaaaagaagcggcttcaggcggtttttccagacaggcgtcccggtggcttgaggagtgcgggcaagattttctggagatcgtcaaatctgaactcatcagcacacaaacgattgatacagaaaaactgctcagttcctttgagaaaggcgcagaggacaatctctggattgtgcaaagcggcgggctttcgcttgaggtggggacacagcttgattacgcctcatttcttaatgacggccattggacgtcaaaacaagatgtgagatgggtgccggggcgttttcaaggctcacggtttatttatgatccagccgcttcaacgggaatggcgctcaagagaaaatggataccgggcacgggctactgggatcatgcactgcttttatatgaacagctgtttgaaaaatcgctggaaagcaaactgcgccagtggctgaagaagctgtaaaggaggagcaggatgaacagtgaaacaggatcgatcatggcgtttttgtacagccggtggtctgttcccatttatgaacgcgagcttcctgatcactttcaggtgccgtcgttatacgtcccgccaccatctgttttcgaggaaacagatacggtctccacatttaaaaaaacctacagtctcaatgtaaaactgtttcatctggactccgttcaggcgctggatgaagcggacaggctcgcggatgccatcagagaagcgagaaatatgattccgctgctgagtgaatccggcgagaagacgggggatatggttcgcatctcccaaatcgagacaagggtaggggacaggggcgaggcggccatggtgatcaggtggagcagccgatattattatcacaaaacagaacagcctgtcttacaggatatcgacatgaacagcggggtgaaataaacggtgtcaaaggacaaacaacagaagaaggctgtacatacaaagagccgggaagctctatttgatacagcggatttgattaagcacgcgaaggaactgttcggcgttaagccggatattcttcagggggctttatttggcgtggatcaaccacgtatgacgaaatcagaagccaaccaattgattcaaacatttctaaccaaggaggtcatgtcatcatgaatggcggaacatttacaacaggcaaagaaaaagaacgtgcaggtatttattttaactttaaaacgacggcacaggagcgggtatcactcagtgaacggggaacagtcgcacttccggtcgcatcaagctggggcgaagcgaaaacgttcgtctccatttccagcgttgaagacctaaacaaaaaagtgggcctcagcattgatgacccgtctttattgctgctgcgtgaagcgaagaaaaatgcgaaaacggtattgatgtaccgtctaaccgaaggtgtccgagcgtctgctgatattgctgaaggcgtcaaagcaactgcagtatatggcggaacaaaaggaaatgacattatcatccgcatcaatcaaaatgtgctggatgctaattctttcgatgtgacaacatatatggacgaatcagaggttgataaacagactgtcaaaaaggctgaagaattaacagctaacggctatgtcacttttaccggaacaggcgatctttcttcaacgattcctctcactggatcagaaggagacactgcagctgagacgctgaatgcatccgcgggaatccgtttatctggcggtacggataaagcccctgtcaactccgactatacagatttcttagccgcggctgaaacggagagctttgatgtgattgcgctgcctgttgcagaaggtgaccagttgaaggcgacgtttgctgctttcattaaacgcctgcgcgacggccaaggacaaaaagtgcaaggcgtcacagccaattatgccggtgattatgaaggcatcatcaacgtaaccgagggtgtgctgcttgaagatggcacggaagttacaccggacaaagcaacagcttgggtagctggagcgagtgcaggagcaacctttaaccaatcactcacatttgtagagtacgaaggcgccgttgatgtgttacaccgccttgaccacgatacgattgttgaacgtctgggcaaaggtgaatttttattcacattcgacgcccgtgacaaatccgtcagcgtagaaaaggacattaactcactcgtgacgttcacagctgagaaaaacaagaaatttgcgaagaacaaaatcgttcgtgtcctggatgctgtgaataatgatttaacacgcgagctgaaagccttaattaaatcaagaaaaggcagcggaagcgatatcccggcatctgaagacggactgcagtatgtaaaaacgatgatcacgcaatacatgacaacacttcaggatgcaggcggcatcactggctttgattccgatgaagatatcacaatttcaatgaatgaagatcgtgacggcttcttgattgacctggctgtacagcctgtcgacgcagcagaaaaattctactttaatgtggaggtaaactaatatggcattaaaagcacaaaacacaatctcaggaaaagaaggccgcttatttctcgatggtgaggaaatggcgcacatcaaaacatttgaagcaaacgttgagaaaaacaaatccgaagtcaacattatgggccgccgcatgacaggccataaaacaacaggggcaaatggaacagggaccgcaacgttctacaaagtcacatcaaaattcgtgctattgatgatggactatgtcaaaaaaggcagcgacccttatttcacgctccaagctgtgctggatgatcaatcctcaggccggggcacagagcgagttacgctgtacgacgtcaactttgactctgccaaaatcgcaagccttgatgtcgattcagaagcgttagaggaagaagttccatttacattcgaagacttcgacgtccctgaaaagctatctgacacgttttaatcaaagctgaatcagcccatacgtagacctttctcagaaaggtctgttttttaaagatgaaaccaaacaatagacaagggagttttttacatgagcgagaagaacgaaaacgtatatgatctttccttttttatgccgggaaaaacaattgaagctgaggaaatcaaagtgccgatctcaaagcgttttgttgataaaaaagggaatgtcattccgtttattttaaaaccaattactactgaacggattgatgaattagagaaagaaaacaccacatttaaaaatgtgaaaggccgcggccgcgtcaaagatttagactcccagcgcttttatgcgagaattgccatcgaatctactatttatcctgattttcgttcaaaagatttaagggaagcatacaaaactgcggatccggtagaagttgccaaacgtgtattatctgttgggggagagtatgcgaactggctgaataaagcaattgaaatcaatggttttgaagatgatcttgaagatctagaagaagaagcaaaaaactagtaaaggatggcgataaggaagctgtgtatttgtactatgcaatgcatgagcttcattactcgccatcccaacttcttgaattatatgaagcaccaaaacattttaaagctcttttatttgggttgataggttataagctagatctattagaaaaagaatcaaggagaggagggaactaatatcgcaaaattaacagcccgttttgatctcgaagacaaggtatctaaaaaactaaaacggatacataaaggattccaagaggtcgaaaaaaaagtcaaaaccattaatcggcaaatcaaaatcagtatcagagcggaagatcaggcattttaccggctgagaaaaataaacgactatatcattttgaaattcgcgaaatcgcttgagattaaagttgtacttgatgaccaagtcacatcaaagcttgatgcaattgaaagaaaacttaaacggctgccgaaagaaacgaagctgactgtctctttggtagatcggacagcagctgcgtataaaaaaataaagaagatgctttctaatcaaaagctatcattccttttgattccagatgacaaggttacttctacagttaaaaggattatcggttatattaagaaaaatttgaaaaacggatacacagtaaaactaaaggtcatcgatgaaatcaccaaaacagttaatcgattaacagcccttctaaggaaatttgaaaaaacctattatgtaaaagtggttgttaagacaaaaatatcagacaaaatcaataaaaaagaaagcccgattaacaaagaaacttctaagaaagaatcagacaaatcctcagataaaggctctgataaaaactcagatcaaaaacctggatgggtcggaaaaataaaaggctggctgaaggattggtggacaaaatcagcttggccttggatcaaagatacgctcaatgaaataggcaaagcttttttggatcgtttcaaagagagattgatagaaaagctgaaaaatgatgtgtttgataagatcattgataaaattctaggaccacaaaaaaaggacgattctggtgaaaattctgacacagataaaaaagtccttaaccgtaatacaggaggaaattgttgctgtgactgctgtgaaggcggtatcagcccgggcactaaaaataaaaaaacctatagaaaaaagaaaagtcccacaaaggctccaaacagaacactcaaggttcctggagaggtgataagaagacgtcaaagcggcacacctgctgaaagtgcacctaggacctcgggttccaagttaaagaactggcttggaggcttaaaatcgctagggaaggattcatccaaactaggtaaagcgttcagaggaatgggaaaggctgttccatacgtaggatctgctttagcagtgtttgatttagctggaatcaataaagataatgctggcgaaaaggttggttcaatcggaggacgcattgccggagcggaagctggtgcaacagccggagcggaagctggtgcaacgattggatctttcgttggtccggaaggtacagcaatcggcggggcaatcggcggaattggcggcgggttagtaggcggaatcggcggcgaagaagcaggtaagaacattggtaagatgtttgatacttctaagttaaaggagagcataagcaattcactatttaacaaagagtggtggagtggaaaatggaactccatttctgatactgccaatggggctattacttggattgaagatacatggagtaaagtttcaacttggtttgaccagtatgtgtttacacctatatataatgttgctgtacctgtaattaattttatagtaggattgtttgcctatgcatgggatggcatattggcagtatggaacattgtctacccgtggtttaaggataacgtgtgggatccaataagcggagcagttactaatgttgctacaacgatatggactggattgtgcaacgcctggacggttatttcaggcatatggtctactgtttcaacatggtttatggacaatgtgtggaatcctgtaagtgaagccgtaaccactgcggcaacatggatttggagtaagatcaatgatgcatggacaataatttccaatatttggacaggagtatcgaattggttttatgataatgtatggaacccgatcgtcaaaaaagtagaagatattaaaacttcaataaaagaaaaattcgatgatgcaaggaaattttttgaggatgcatgggatggaattgaaacttggtttaatgaacatgtgaaagatccattggttaaagtatcagagaaaattgctgagaaatttcaatggctattcgatttaaaagattcagttggtggtttcgttgcaaaagtaatacacaggggggaagaagttactcacctcaagaaaaaaccaatcaaaaaggattcgaaagagaaaaaaactagttccaaaccaactactaataacatttttgctcaatctccatcaaataataatatgactgtttttcaacaagcactagatcagaacgccacaggcggctacatcaccaaaccaaccatctcgtggatcggtgaagccggcaaggaattcgttatcccggttgataacaaccgaggccgggggaagatgcttctttcacaagcggcgtctaagctgggtatgcaagttgtagacgacatgggcgcagcttcgtcttctggcggaagtccagcatctgtttcaggaggagcagctgtcagtcctctatcaggcacagcctccccagtaatgaacactgcaaatcttacaggccaagcgtccacactcggacagcaattttcagaaggctttggtaaaggcatcagcgatcagccggtcaaaatggaagactggaaaaagaaaaacatcaatacgccatttacacaaatgatttctgcttcaccaaattacggtaaacaaatggtaagtgggtatgccaagggccaaagcggcactgcaaccggaacagacggctttttgcaatcaaaagttaaaacgccgttccaagccactgtgagcaaatcgtcttcatggggcacaggaacggtcaaaggctttgcgcaaggacaaaattcaacccaaacagggactgcacagtatgtgagtacacatgttgacaaaccgttcctgcgttcaaaagacacatcgaacagctggggctccggtttgattggaaactttgtgacaggcatgaattctaaatccagtgaagtaaaacaagcagcaaaggatatggccaagagagtggagcaggctttccgtgaagaattagatatccattcaccttctcgtgtcatgatgagcttagggcgttttgcctccgttggtgttgtaaaaggtctggattctgtcgatgtgaaaaaatatgctgaaaagcaagctggatcactggcagctgcttattccggaatgggtgcagtaggtggaaatgtgaagcagtggcttatggctgcaatgatggccacaaaaacaccattaagctggcttccgggattgatgacaattgcaaagtttgaatcaggaggcaaccctaacgccattaacctgtgggatagtaacgcgaaggcaggcaatccatcccaagggctcatgcagacagtaccaaccacttttaacgcacacaaagcgccaggcatgggtaacattagaaacccgattcataacgctgctgccgcaatcggctacatcaaaagcagatacggctctattgacaatgtacctggtattaaaagcatgaagcatggcggaccttatgtcggttacgcaaacggcgggctgattacaaaagaacaaattgcacgtgtcggtgaaggaaacaagcgggaatggatcatcccagaggaacgtggcatccgaggccgctacctccttcagagagctgcgcaagctctgggaatggaagtgacagatccgtctcaatcccagcagtctgagctttcttcaggacaagtttcagcagttacatccggtacacggcaaacgatacaaacagccggaacgaaagaaataaagattgagtttaacggagaccagcatttccataatggacaagacgccgaaagccttgcagcgaaaatcaagcaggcgcttatagatgaattgcaaaaggatatcaatattggaacgaagggagtcgttgcatttgactaaatccgtatatgaattttggatttcacaagggaaggacaagttgcggctccccgttcttcccgaccagctgaatatttcaaatacgattcagaatgagacggttaaagtagccaagttcggtgaccttacatttattgacgaacaaggagcgaaagaaatttcgttctcttcgttttttccgaagaaatacagcccaatagctgaatatcaaaccttcccgtcgccggaaaatgcgataacaaaaattgaaaaatggatgaaggccaaaaaaccggttcagtttttgattacgggaactaaagtgaatttaacatgcagtattgaaggtttttcctatagcgaaggccagcaggatataggtgatcgttcctttgatattcaattaaaagaatacaaaaccgcttccccgcggaaaatcaagcagaagaaaaaaacaaaggcaaaacgtccgtcgaaggctgcgccgaagacgtacacagtgaaaaagggagacacgctatgggacattgcaggcagattttacgggaacagcacccaatggcgcaaaatttggaacgccaataaaacagcaatgatcaaacgaagcaaacggaacatcaggcagccgggccactggatttttcccggccaaaaattaaagataccgcaatgaaacaggtgatgtatgatgatagaactgttcgtcattaaagacacagagtggcttgagctggttgcagaaagcgtatcgcttgaaggccatcgttatcaggcgccgcgttctattgaagcaaccatcgtcaccaagcagggcgaccagacgtattacagtgtctcagaaggagatacggtcttgtttaaatggaagggaaaagagctgtttcggggcattgtttttgcaagaaccccggacgagcatacgcttgccttcagcgcttatgacatgcttcagtacctggtcaaaaaccaggatatgtacgtgttttccaatcagcgggccgaccagatcataagaaggattgcgagtgacttccagataccgacaacctcgatcgcaaacacaggccatacgatcaaaagtcttgtcattaaaaatgatacgacattgtatgacatcatattaaaagcgctgaaacagacgaaaagccagacaggacgacattaccagctgtattcggaaaaaggaaagctcggtctgcgcgcttggccagatccgtcagaagtatgggtgcttgaaacgggcgtcaatatcacgggctaccaatacagcacttctataaacgatactgctactcgggtggtgcttcgccggcagaaggacaataagacatataaagcctctgccaaggacagttcaggcttaaataaatacggtgtgcttcaatatacggaaacggtcacagatgacatcaaccaggcacagcttcagcagcgggcagatgtacgccttgctgaaaaaaagggcgtgaaaaaagaactgaaaaatattcaggcagtgggcattccggaagtgcagagcggcttgcccgtctatatttcgattccagaggccggcatcaagaaaacctattgggtagatacggaccggcatgaatttaaaggaacgaaacatacgatgacgatcgatgttgtcgaaaagaatacgatgccggaaggagtatcctgatgagattaagtgaggctataaaacatttggcagtcggcgcaattgacgctgagtctccggtagaactgctcccggctgaagtcgtttcggtttctcctgtggaaatcaaattaaaagaaaacagcaaactgatcataccggaagacgccatcattatcccaaaacgaatgcagtccggaggagacgatgcactcgaaccgggggatcgcctcatgaccgcggctctgactggcgggcaatcgttttttattttagataaggtatagacaaaccgcttcagtacgaaggggtttttatttagcatgtaaaaggagtgggcatcatggccctgacaccagaagtggagtttgaagatattgaagatgtgagtgaaatcattgaaacctcgcaaacgtacaaaatagattttgaaaacggaagaattacgaatgagctgattaccgggcttgaagcgatcaggcagttcgtgtatatcgccttacagacagaacgctatgcgtattccatatacagccataatgtcggaaacgagcttcaggacgtgctgaccgatcatgagacaactgatgcctataaaaagatggagatcccgaggctgatagaagaggcgctggtttatgatgaccggatatcggctgtaacagattttgagattgaaaaacaaggcgacgcgtttcatgtgtccttcgtggtggagacggatgaaggaacgcttgagattgaggaggtgattggcgaagatgtttgaagatcagacttttgaagcgattatggagcgtatgctgaacagcatttccgcagatattgacacaagagaaggcagcgtcatttataatgcgttagccccggcggcggccgagcttgcgaagtcttatatatggctggatactgtgcttgagctagttttttctgataccgcacaaggcgaatttttagacaggcgtgcagcggaagcgggaattgaaagaactgccgcgacaaaggctgtcagagcgggagagtttacatctggagttactattcctgtcggctcccgcttttacgtggataatctttattttcaatatacggcagacgggacgctcatctgtgaaacacctggtgaagcaggaaacgccaacctgaccggacgcaatttactgtcattggataccattcccggtttagaaacggccattgtcaaagaaatcctgattccggggcgcgaagaagagggagatgacagcttgcgagaacggtattttacaagggttcggcgtgaggccgtcagtgccaataaaatgcattataaagagtgggctgaggaagtggacggtgtgggaaaggcaaagatcttcccgctttggaacggtgaaggcacggtcaaaattgtcgtcaccaatgcgaatcttgagcccgcttctcctattttaattcaaaaagtgaaagattatatcgaccctgaaccaggacagggagagggacaggcgccaatcggagccgttgtcacagtggagagcgcggtctggaaagaagttgagatttctgccgaagtgctgcctgagatcaatcactcaattgatgaagtgaagtcagaaattgaggaaggcgttttaaatctctttaagaaaatggcgtttgaagataacgtcatccgcctttctcaaattaacaatatcgtctataattcaccatcagtcagtgactactccaatattcaaatcaacggcacgtctgaaaatctggtgttgagcgacgtggaaattcctaagcttgggcaggtgaagatcattgagcaaacaagatgacatgcgagcttatctgccgccgtttctcaccagccttaaagaaatggctgagctgctgaaagcggaagcgcctgagtttgataaacaaaatgacagcatatttgatctgacggatcagttattcgtgccgacggcgacatgggggctcagccgctgggaaaagattttaaacgtaccgcgggaatcaggtgacactgatgagatcagacgattgaggctcatttccaaaatgtcgaacatcccgccaatcacatacagggccattgagcaggcggtaaaccgtttcttgaaaaacccgtctgcacaggtccgcctgattcccggcgaataccgatttaacgtcgatatcaatgttgatgacctccagcacatgaatgagctgatcgaagcgatagaaaacatgaagcccgctcatttggcgtatacgctcagaggcggattgaacgagacgctgcaaatcaaagacacagttatcctgaatcatcgcagataccgaacagccagtgagctcaaggtcggttattctgtcactcttaacaataatgaggtggtcttaacttgatttcaaccatatacagagaacgcacagcggctgatctaaaaagcagaatcgatcacgtgctgctcaacggccaaaaaacagaaatagtagatctcaccattgacggtgcgaccgtcaccattctgacaaaacgtgaggaagacatcaagcatatcgaaacggtacaaatttttgacgagctgggcaatgtgatcacagagagaaagactgacctggacgtcagcgaaaacagaacacttgatttcagatttacttttgaggtggtgtaaacatggcatacgaagaaaaaacagactggcttccggacgaccccatcaacgaagatgacgtcaaccgctgggaaaaaggaataaaagacgcccacaccgacctggccgcccacaaaaacgacatgaacaacccccacaacacaacgaaggcgcaaatcgggctggggaatgtggataatgtgcagcaggcggcgaagaaggattttgacaagcatgtgaatgacggtacgattcacattactgctgctgaaaggtcaaagtggaacaacgctcagttaagtaagatatcaggtgatgatggaagggtcttttacaagagtgtgaccgaaattactgattataatgatttaaccgatactggtatgtacttaatatacaatgacggcttgaagggtccgggcctaaatcagtgttttctccttgtgatgagctataaaaacacacttgttcaaatagcttatgacggaattaagggagagcagtcattttttagaataagaaaaaacgattctacaacatggacaccatggattgaatcagaaactacagaggggtctcaaaagaaaatagatgcacatgctaataaaacagatatccacgtaacaaaatcagataaagacaagtggaacgactcacagctctttaaaataactcaggataacggtctcgcaaagtactgtgaagatgcagatttcaatactgtcatcgaaactggattctattacatgagtggtgcgacaacaacattaaatgctcctgttaataacaatggttatttaatggtttataatttcagcacgtatgcatatcaagaatacacgtcttatagcagtagtgacacaatatcaactggccgaaggaaattcatgaggaataaagtggctaactcagacgtttggacatcttggcgtgagatcgaatcggttgaaggctcacagatcaaagtagatgcacatgccaataaaacagatatccacgtaacaacatccgataaggacaaatggaataatgcacaactatatagattaacagatactcaaggttgccgaactaaaatcccagatgggactgacttgttaacactaccctctggcttttactatgcattagggaacgtcataacaaataatcctgtttcaggagatggatcatggtataactatgatgttatcgaaacagagggaggcggacgaaaaacaattttggcctctagaagttatgacggaaccttttggacggcaacgatccatacagacggcgtgtttaaaggctggaataagatcgagactgaggtaagtgctcaaaccaaagcagataaagcgctagctgatgctaaaaactatgttgactctaattatacgaataataaattaacagttcttacaggctctaatgcaatacaagacgcaagaactggggggaatgaatatcctccagggttaacactaatggatattggtcaaggaaatactacaggttatccacttggttatggaattgtaaaaaatgagaaatacagtgattttagatttactcaatatttttacggtacaggaaatgaatcaaatagttatattgatagtactggaacgtgggttcgtcactggtggagtggttccggctggactgcgtggcaaaagatatcagggtttgctcacgctaatattgggactactgggcgtcaagctcttattaaaggagaaaataacaaaattaaatataaccgtattataaaagatagccataaattgtttgatacaaaaaacaataggtttgtagccagtcatgcaggaatgcatttagtcagtgctagtttatatatagaaaatactgagcgatactccaattttgaattatatgtttatgtaaacggcacaaagtataaattaatgaatcaatttagaatgcctaccccttccaataacagtgataatgagtttaatgcaactgttactggatctgttacagttccgcttgatgcaggagattatgttgaaatttatgtttatgttggttattctggagatgtaacacgatatgttacagattcgaatggagctctcaattattttgatgttctggagcttggcggaagaaattacccgagagtttaggaggtacctttatgatcttatatgatgccattatgtacaagtatccaaacgcagtatcgagaaaggattttgaattgcgtaatgacgggaacggttcatacattgagaaatggaatctccgggcgccgttgccgactcaggcagaactcgaatcctggtgggaggaatcacaaaaaaacccgccgtacgagccgcctgatcaggtggagcttctcgctcaagaattgtcacaagaaaagctggcacgcaagcagcttgaagaactgaacaaaactttgggaagcgagttgtcagatataaagctttccatactttctttgaaaggagattactctgaatgaattattgggtgcttgccctctattatgagtgggcgacaacggatatggtgaaacaggccttagcatatcaagactgttcaattgaggatctggcagagggtgtgaacaaaaagctgatcacagctgaccagtataaagaaattaccggtaaagccatgtagtaaggcttttttattttgcctgtttttagatcaaaggaggatgaagatggtgaagtatcaatatgaatttcctctcgataaggctggaaaagccggcgctgtaaagccctatcgaggaggaaaaaatgattttgtgacacctgtttcgaatttgtcaggcgtagcggagattttaacaaatgcttccttaaaggcgactgaggcatacagtcagctcgggcaggacaggcttggcgcagttctgatttcgaaagtgaagggctgggcgtatgcagatcgtgaaggtacgctctttatagaagaaagcgacaacaacaatgtttggacaacgacagcagcagttaatgtcgcagcaggtgtcctgacagcgacggactgggtatacctttctaaacgctattaccgtttccgctatgtgaacgggaatcttcagcaatctgagtttgtattataccaatcagtcggtgcgggtgagatggatgtgcgtgtcaatggaaaaacgcctttacagattgactttgcggagaatcaaacacacgatggacggctgaaagtcgaggctcgcaaaacatttgactttgtctttcatgaaaatgcagagtccgccggcgagggtgcttctttacctgttgacggtgccgcgcatttactcgttgaagtatatggcacagcggaaatgagcgaagtcaaattttggggcaaatcggtgtcagggcagaaactgccgatcagaggcgtgaaaactgatgatgccacctctgctttgagtacattaggaaaagctgaggcatgggccttcgatattaaagggtttaaggagatcatcatggagatcgtcagtatcaccggcggtactctctcggtaaaagggaccgctgtttcataacagttttggctctcggaagggaggtgatctgcatgtgaaggaggagtgaataatgcagcaagaggcagatgtgaatgtgtttcagcaggatttagcagacatgaaaggcgagcacaaagcacttgagcagagggtttccgcattagaacgcgtgtctgaccgtcaagaccagcaaatcatgacgctgaacgaaaaattaaacaaaattgaagaaaacactacgtggattaaacgcaccatcacaggtgccatcattacagcagtgtctacaggcatcattggcggagccatcgccattatgtacagcctgctgcagcattaaagggggattttcatgaacacgtttgacaagggcacggtcatcaggacggtgcttcttttaattgctttaatcaaccagaccatgctgatgctcggcaaatcaccattggacatacaggaggagcaggtcaatcagctcgctgacgctctttattcagccggttccatcgtatttacaattggaacgacacttatcgcttggtttaaaaacaactacgtaacagaaaaagggaaaaagcagcgcgacgtgttaagggacaataatctgacgaaataaggagagatgaaaatggttaacattatccaagactttattccggttggcgcaaataaccgtccaggctacgcaatgacgccgctttacattacggtgcacaatacagcgaataccgcagtaggagcggatgctgcggcccatgcccgctatttgaaaaatcctgatacgacgacaagctggcattttacagttgatgatacagaaatttatcagcatctgcctttgaatgaaaacggctggcatgcgggagacggaaatggcagcggtaaccgggcttctatcggaattgaaatttgcgaaaatgccgatggcgattttgaaaaagcaacagcaaatgcccagtggctcatcaaaacattaatggctgaacataatatcagtctcgccaatgtcgtccctcataagtattggtcaggaaaggaatgtccgcgaaaattgttagatacgtgggattcgtttaaagcaggaattgggggaggcggcagccaaacttacgtcgtgaaacagggcgacacacttacatccatagcgagagcatttggtgttacagttgctcagctgcaagagtggaacaatatcgaagacccgaatcttattcgcgttggtcaagtattaattgtaagtgctccatcgtccgctgaagaacccgagctctatccgctccctgatggtatcattcaattgacaacaccttatacctcaggagaacacgtctttcaggtgcaacgagcacttgcggctctgtatttttaccctgataaaggcgctgttaacaacgggattgacggcgtttacggaccgaaaacagctgacgcagttgcccgttttcagtctgttaacggtctaactgctgacggtatctatgggcctgcgacgaaagcgaagatcgcagcgcaattaagctgatcacagaccataaaaatcccggagctgctccgggatttattttttcttcttcaactttttaataattccagcactgcgctccctcacccgaagcgagtacccggaaagcccaaaccttccgtaatcaacaaacttcacacgcctcaccaattttttcactgtatcacctgacattatcctctgtttgtatttattatatgtaaccctttaagaaaaggaataaggacaagagctgttttcccttgtccttttagtgtgatcatgctttttttcgtttatactcgtcaatcagccgttcgttttctttgaagattcttgctgtatgcggactgacttgatagcttgcgacactggtggttgaacgttttttcaggattttaaacggcttcgccgctctgggctcgcatctgttttgaaacgcacgttccattatccttcaccttcctcctcaattggcagcaccaaatcatatatgctcgttaatgacgtaaatagcaaataatcaaattccgtgacaatgctgtcagacgtcagcttgatgacatagttctgtgtctcgatggtaaaagggatgagaaccacttttccgtattggtcgtaataaacatcctttcgatcgagccgtgtttgtacatctgccggatcatccatatgctcggttaaccggtctttatcagcctgtgtcgaatagtggcaaagagaagccgttaagttcattttatcagcataggttttcagcagcttatcaataccttcagcataagcatctatacttccataataaacatggatcggctcgtttttcaataggtattggtatgttttcagccgattgagatacatgtggagcatttcgttgttttcttcaagaatttctcttgtgtctgtttcaagctcgctgccggccagttttttgacgtatgcacttaagaagataaaagcatcaatcaaagcaaaactgactgcgacaatgagataccgttcccagtgggtaaatagggaagtgggctcatatgtccagtataccatagcgcctagaacaaacagcaaataccaagttttccggatggcggacattttttctttgaccttcgcttcgaaacgccacgtggcatatacgtataaccccagtccggccacgatgcaccagaccatgatctgaaagaataaaaccatattcgaatccctcacatttgaaataggttctgcttattgtattcgagagatccggatggttttcctgttccatcaaaaaaaccgctcctttgacagaagcggtgtgacattaaaatatcatatttaaaataaagtaggcgatggcaccaagtgtcgctgaaatcggaagcgtgatgacccatgtaatgagcattcgcttggccgtaccccagtttacaccttttacgcggtgggacgcaccgacgccaagaattgatgaagaaatgacgtgggttgtactgaccggcaaatgaataaacgtggcgccgaaaataatggctgctccggttaagtcagcggaaacaccgtttaccggacggattttcatgatctttccgccaacggttttgatgattttccagccgccgattgatgttccgagacccatggctgtcgcgcaggcgaattgtacccaggtaggaatatcattagcagaagtatgtaaattcgctgtgatgagagccattgtgataattcccattgctttttgcgcatcgtttgttccgtgtgtatacgattgcagggcagctgttacaatctgcactctgcggaattgcttattcgttttcgccaagttgctgtctttgaaaatcagcttaacgatgctataaagaataaaaccaaggacaaaggcaataattggtgataggatcagtgcttcaatgattttaatgaagcccttatagtttaacgctgcaaatccggctgccgcaatggctgcaccggcaatagcgccgatgatggcatgggatgagctgcttgggataccgtagtaccatgtgataaggttccaggcaattgcagcgagtagcgcagccaaaatgacaacagagccattttccagcgtataaggatctacgatgtctttcgtaatggttttggcaacacctgtaaacgtcattgctccgacaaagttcatcacagccgccaatataatggcatggcgcggttttaacgcttttgttgataccgaagtcgcaattgcgtttgccgtatcatgaaacccgttgatgaaatcaaacgccagagcacaaatgactattagtatcgttaatattaatagaatatccatttttacccctcgttacgcgtttttcataatgatggtttcaagattattggcaacactttgacaagagtcggcgatttcttcaagcgtttcgtatatttcacgatattgaatgactttgattggatctgtttcatttccgaaaagattctttaatgattttctgtgcaagttgtcacagctgtgctcatactctttaattttgattgcgtgaggctgaatatcctttaagcgattttctgccagcagctcgatcgtaatcaaaatctctttcgcacattctctgatatatccgctgaatttatcaatatgctcgtctgatgaagtaattgagaaaatctccatcatggcagagaaatgttcgattccgtcaagcacatcatccaagctgtttgtcagctgaaggatatcttcgcgctcaataggagtgatgaacgctttgttaagctctttaatcatgacatgaacatgattgtcaccttttgtttcatattcctttaacgtatctgcaaattctttaagagtcgtttggttagtgaccttaaaattcacaaaatattctgcagtttcgtctatgttctttgcaatttctgttaaaaggagtgagaacttatctttttttcttcttatcattaaaaaccctccatagtttgaatgaacaatgcacacatcaaattattatatagccttttgtcgaaaaaaaacaggtaaagtcgaaaaaaacgtatcttgacttttttgataaatcgtgtctccttattttgacctacttcgctttaaaaaaacgacccaagtttgcaaaaactttctgcttaacgtaaaaagtatatcaaaagttgtgtttttcctgtcaacttttatcttctgtttcaccaaaaaacggttccctaaacaagggaaccgttttatcagcttgcttttcgttttttcatcccgtaatagacaggcagcccggcaaggccgatgaggatggataatccgcagctcattgtatctgtaatgagtgtgctgcctagcacaaagaaggagcccgcgattgccagaattggcatagatggataaagcggaacactgtaggcgcgcttttttccctttgctcgcttgcggagaataaacactgcaaaaaaggccatcacataaaaaatgtagatcatgaaaatggagatttctgagagcttatcagggttgctgatcagcatcataatcaaagccaaagcaatttgaaaagaaatcgcaatccatggtgtgcggaacgacgggtgcacatgtgacagtttttcagcaaatggaagctgtttgcgttccgccattgcaaatgaaacacgcgggaaagaaagcacctttccatttaagcacccaaagatgctgacgataatccctacactgatcagctttccgccaattgacccgaacagcatggttgccgcggtgcttgtcgcattttcaccaagcgtgacaatttcgttcgctgacaggatgtggagcaatgcaaaattaatgaaaatatagatcgctgttacaattaataatccgcccgtcatagcgcgtggcagcagcttttcgggatttttcatttctccgccgagagcggcaaggagaatccatccgtcataagcaaacaacgtagctaaaatagccgccccgaagttcatatcggaaatgctttcgtttactgctgtgaagatgtgctgatcgcctttccaaaggccaaagatgatgatgcaggcaatcggaatcagttttccgatcgttgtcagcgtttggacaaaaccgccatattttgtaccaataatattaatgacgcataaaaagagaactgctatgattccaatgacttttgatagtccagatccccagccgaaaagattcgccattaaagatccaaaatataaacccagcgcgccaataatcgccgggccgtaaatgataatctgcacccagccgcacaaaaatccccaaaactcgccgtacacttcttcaaggtacgtataaagaccgccggtttttggaatctgcgttccgatttccgcgattgtcaaaccgcccgccagtgttaaaataccgcctaacagccaggcgaaaagcgctgtttttgaatcacctgaataagcaagcacagcgccgggcttcataaaaacaccagaaccgataatggttccgatgacaagagtaagggcaaacaagaggcctatctcttttttcaaaccgttgtcttcagtatgcatgtccttaacctcctatgatgttgaagcttcatgttgaagaatctattttttcatattgtaaaccctattttagaaaagtgaaataaaataaattttctgattttcgaaatttgctttgtgtacagcaaataaaactgtaaaaacgcttgttttaacaatctataaacgaataaacttcatgatttttatttgcaaagttcgtgttttctgtattaggattttagccggtacggaggggagaattcagaaaatgaacgaaccttcggtgaagctgatatgttgactttctcatgcgaataaaatactttgttattagaacaataaatatacaactatgatatgatatctcgaaatcgagataaaataacctggagggacagcgtatgaaagttaacggcattcaccacgtatcggcattaacggccgacgcacaaaaaaacttggatttctataagaaagtattaggattaaagctcgtcaaaaaatccgtcaatcaggatgaaccgacaatgtaccatctgttctacggagatgaagtggcaaacccgggaactgagctgacgtttttcgagattccccgcattgcaccgtttcatgcgggaacaaacagtatttcttctattggattgcgcgttccaagcacagaagccctgcattactggaaagaacgttttgaagcgcagcaagtaacgcacagcggtatatccaaaagagctggacgtgacatattggcatttcaagatcatgaagggcagcgacttgtgctgactgctgatgaggaaggaaaaggatatggcctgcctgttaaacagagcggcattccggaaaaattttcgtttcgcgggttagggccggttgaactgactgtgccatatgctgaaccaactttacacgtattgacgaatattcttggatttacagaaatcagccgtgaaccagtcgaagggcaaggaaccgccgttattctggaatcaggagaaggcggtgctgcaacggaaatccatttaatagaaagaaacgatcttccgcgcgagcgtcaaggcaaagggagtgttcaccacgtcgcatttcgggtaagagatgaagaagaacttgccgggtggcaccggatcatcagccgcgaaggctttagcaattcaggcatagttgagcgctactatttcaaggcgctgtatttcagagaaccgaacggcattttgttcgagttatcaacagacggaccgggctttatggtagatgaaaatcttgatgagcttggccaaacgatcgctcttccgccatatcttgagcatcgaagagctgaaattgaagcgaaattgaaaccgatccaataaattgtgattcatttgccctccggcgcgccggagggcttttttattttgggaaaacgcatcgccgattacgatttggagaaagggctagaaaccagctgtatataggatgattggcatgaaatggcctcggcaaaaatattgtctttgtttattaatagtttattcatatttgcttgttacactatttccaagttagccaaaaggagtgaaaaacacgtggaaaagaaaaaacgcgagctggatattttcctcatcctcattttgctcgcatctgcattcttaaatatctataacatctggaatgatgatacggtgaatccttattacaccgctgcagtcacaagtatgatgcaaagctttcataattttttctatgcctcattcgacgcggcggggtttataacggttgataaaccgcctattacgttccagatacaaaccatcagcgcacttatattcggtatgcacggctggagcgtcatcctgcctcaggcacttgctggtgtaggttctgtccttttaatgtatctgttaataaaaccgacattcggtaagacagcagcaagaattgcctctttcatcatggcatgtacaccgattgctgtagctgtagcacgtacaaacaatgttgatgcattactggtatttttcttattgcttgctacatggcttctctttaaagcgatcagaaaaggaaagctgatctggctgttagcagcatttttcgttgttggagtaggatttaatacaaaaatgctgcaggcttacatgattttaccggctttcttattgttctatctgattgcggcaaacgccacaatcaagaaaaaaatcgtttcattggtaagtgcgttagccgtattagcagccgtttcgttatcgtggccgctcattgtcgacaatatccctgcaagcaagcggccttatatcggaagcagccaaaccaactctgttttggaattggctttcggctataacggaatccagcggctgacaggccaaaattcaggcggcggccagggtgcgccaaacaaagacgcttcaaaagaaatgtcttcttctgataacactcaagcaccgcctaatcagtcatcaagcaacagctcatcaagcgatggtaaatcctcaaatggcaatatggcggcgcctccatccaatggccaaatgccaagcggcggtcaaggaggccctccaagcggcggagatggcggccaaggcggacccggcggagacggagggaaaggcggtacaggaactggttcgaaaatgcaatcaggttcagggatgtttggaacgggaacacctggtccactgcggcttttccaacaagagttatctgatcaaatcagctggcttctgccatttgcgatatttggaatcgcaggcttactgatcgctggcgcgagagaaagaagaagattatctatagagcagaaggaaacggtgttctgggttgcgtggcttgtaccgattgccggattcttcagtgtcgcagaatttttccatcattattatctcatcatgctggcaccgccgattgcggctcttgtcggtgcggggtgggttgctcttgttcatctgtaccgcaatcagacaggctggaaagcatggcttttgccgggagcaattattgcgacaactggatttgaattgtttattctcagaaactacaacgatcaaatcggtgcaggctggagcatcggtgtaggtattatcggcgcattgtcagcgattgctttgctgctgtttaaacagcgccaaaaaccgttcagttattatgtttcacttgcagctctcctcgcattgctggtgatgccagtttattgggcaagtacgccacttctgtacggaggcaacagctcactgcctgaaacaggccctcagctcgcatcaatgggcggaaaaggcatgggaatgtctgatgcgactgtaaatgaaaaactgatcaaatatctagaggagaataactccggagctgaatacctatttgccacaaccgattcgaacacagcggcaccatatatcattaaaacgaaaaaagctgtcatggctattggcggatacagcggttctgacccggcgatcacactgactcaattcaaaaaacttgtaaaagaaggaaaagtgaaatacttcttggcttctggaatgggaagaggcggaaacaatgacattgttgaatgggttgagaaaaatggaaaagaagtagcatcagaaaaatggcaatcaagttctgatcaaaaaacagaaaatactgattcggctgatacatcaagcagcaaggcttcaggtgaaaacggcaaaatgggcggacctggcggaatgaatcagtcagcaacattatacgaactacatgctgataaataggaggcaaaaacatgagcagacatattcaatattcaattgttgtacctgtgtataatgaagagcttgtcattcatgaaacctatcagcgcttaaaagaggtcatggatcaaacgaaggaaaactacgagctgctttttgtcaacgatggcagtaaagaccgcagtattgagattttaagagagcacagcctgatcgatccgagagtgaaaattattgatttttcaaggaattttggacaccagatcgccattacggcgggtatggattatgcacaggggaatgcaatcgtcgtcattgacgccgatttgcaggaccctcctgaactgattttagatatgattgaaaagtggaaggaaggctatgaggtcgtgtacgccgtgcggactaaacgaaaaggggaaacctttttcaaaaaacaaaccgcggctatgttttaccggcttctcagcggtatgacagatattgatatcccgattgatacgggggattttcgtctcatggacagaaaagtctgtgatgaaatgaagagattaaaagaaaaaaatccatttgtcagagggctagtcagctgggtgggctttaaacagacagcggtcgagtatgtacgtgatgaaaggcttgccggagaaacaaagtacccgctcaagaaaatgctgaagctgtcaatggacggcatcacgacattttcacataaaccgctgaagctggcaagctatgcggggattttaatgtcaggtgctggatttctgtatatgtttatcgtgctgtatctgaagctattcacagacagcacgattaccggctggtcatcacttattgtgatccagctcctgttcagcggcattgtccttctgattttgggcgtgatcggcgaatatatcggcagaatctacgatgaagccaaagacaggccgctttacatcgtccaaaaatcgtatggaattgaaaataaaagactctatagagaccagcatatgtcataacctcaaaccccctgtccgtaatggacaggggtttttatgctctgagcccgatctaaagcaaaagatgctgatagatatatggaaattgggtaaagaagagattgtgagcttgtactgcggttcagtcatgccgaaataaaaacagcaaaacttaaagatttcgtcatcggctttgctgcatgtcagctgttatattggggggcttttaagaaacgcatgattagagccgtaccagttatgtttaatagaatactggtacccaatacaattccccacgtcaacgtcgattcagagagaagaaagctcagtaaaagaaaagccaatcctgcgcagatcatactcagtcccacggttttcatgttcatgcctcctagcaaacgatgtttctagcatctgatgtgaatgatgtcaatctgtatgatatacggatatctcgtcagaaagtttcatagagcaattaggtcttttatctaataaaaagcctcagaccgcttttacggcctgaggcattatgtcttacgaagttttctcttctttttgatccagtttaatttttttcgtcatttctttgccgtttcggagaattttcacttcaacggtatcaccgatctttgcgtctttatataagatattgcgcaattcactgcctgtatcaatttctttaccttttaggccgatgataatatcctccgcttttaatccggccttttcagcaggagagcctgaagcgacctcacggatgtaaacacctttattcagctggctgccgaacaggccgagtgtgccttcttggtaattttgcggcacttgttctagatcaagcatgctgacaccgatatatggacgttcaatttgtcctttagacagtaattcttcagcaatcggttttacgtcattgcttggaatggcaaatccgataccctcaacatcatcttcactgattttcatactgttaatgccgacgattttgccgtctgtatttaacaaaggaccgccgctgttacctggattaattgctgcgtctgtctgaatgacgttaatgctcgtttcgccggctgatgtagacattgaaaccgttctgtccacgccgcttacaattccttgtgttactgtgcgggacaggtcttttccaagcggatccccaatcgcaataacggtctcgcctgttctaagatcagatgaatcaccgaagtttgccacttttgtgacgtggtcatcactgatttggaggacggctaaatcagttaacgagtcactgcctaccagctttgcagtaacctcagtgccgtcatataaagataccttcagtgatgatgccccttctacgacgtggttatttgtaatgatataagccttgccattctcttttttgaaaatgacacctgaccctgaaccgctttctgtatcttcgctggaatcagaagaactagagccgaacaaagagctgtttgattgtgcctgaagatttgtaataccgacaatcgctggtgaaaggtcttctaccatatctgagattttagaagagtcctcgctcttgaatgcagatgagctgcttgagctttttttagattcagaggaggtgcttgttgctgtaacagattgcgtttgctgctggctggatgattgttttgcagtgtcctgagaatcatggtcgccaagcggtgtaaacgtgtaaatgccaagggcaagactgccgccgatcactccgccaagcaacggtctgaaccatccgaagcctcgttttttcttctcctgatcatgaatgacattgcgggccgagtaggaggtgctctgatcgttctctttcgttaaaaagacctcattctcattacctttcgttctgttttcatcacgatagttatccatcatgttcactccgtttctctattttcacatgtctatttatattgataggtttatgacttgagtttatcataaacaaaaactgtgggataaaaatgaaaagattatgggaaattgtgaaaaagtgcggaaaacggtacacttcatattgtatatgaaaggactgagtcgatggaacagattggattgattggatatggcagcatggcggatatgatcgccagacagctgttgaaacatgaacaaataaaagagaatgagctatttattgagacgagaacgaagggggagcggctgcgggcactcatgtcagattatccaaacgtatcggctgatccgttggagaattgggcaaatacgtgccaattgattttgatatgcgtcccgccgctccatgtcatcgaaacaatgcgccgtctgcacccgtatgtgaacagaaatactcacatcgtatccatagctgccggtgtgccgctgcgtcttttggaggcagaaacagaagccggtatctcacgtgttattcctgccattacgtccgaagcagaagctggcatctcacttgtcgttcacagtgaagcactggctgcagagaaaaaagaatatctgaatgaattgttatcggttttcagccgtgtacgagaaatcaaagaatcgaatttagatgcggccagcaatttaacgagctcggcaccaggattcatagccgcaatctttgaagaactggcactgtctgccgtcagaaacagcagcctgtccaaagaagaagcctttgattttctgattcattcgctatacggaactggcaagatgctgatcgaaaaaaatatgtctttcgaggagacgctggaacgtgttgcaaccaaaggcggaataacgggagagggagctgaggtgatacgcgcctctgtgccggacgtttttgatgaggtgtttgaaagaaccctgaaaaaatatgaactgcttacagaacaggttggtaaacagacatgaatccttgaaagaggattcttttttattactgaatggttgagattttccccagttatattgcatttttcctctttttttaatataatctgttagaatattcataatttagtaaaaaaggaggagcgttatgaaattgtacatgtcagtagatatggaaggtatttcgggtcttccggacgatacctttgtggattccggcaagcggaattatgaacgcggacggcttatcatgactgaagaagcaaactactgtattgctgaagcgtttaacagcgggtgtaccgaggtgctggtcaatgacagtcattcgaagatgaataatctgatggttgaaaagcttcaccctgaagcagacttgatttctggtgacgtcaaaccattttcaatggtggagggactggatgatacgtttacaggcgctttgtttctcggttatcatgcgagagcctcgactcccggtgtcatgtcacacagcatgattttcggcgtccgtcatttttacataaacgatcggcctgtcggtgagcttggattaaatgcatacgttgccggttattatgatgtcccggtattaatggtagccggggatgaccgggcggcgaaggaagcggaagagcttatcccgaacgtgacgacagccgcagtcaaacaaaccatttcaagatccgcagtgaagtgcttgtcccctgcgaaagccggacggctgttgacagaaaaaactgcgtttgccctgcaaaacaaggacaaagtcaagccgctcacaccgcctgacaggccagttctgagcattgaattcgccaattatggccaagcagaatgggcgaatctgatgccgggaacggaaatcaagacgggaactacaaccgttcaatttcaggcgaaggacatgcttgaagcctatcaggcgatgcttgtcatgactgagcttgcgatgcggacatcattctgctaaaggggtgttttaggctttggcgcgatacatgataaagcgtttttgggcaatggcagctacgattttggtgattaccaccctgacttttgttctcatgaaggtcattcccggatctccttttaacgaggagagaggcacaaatgaagccgttcaaaaaaatctcgaagcctactatcacttagacgatcctctcattttccaatacattttctacttaaaatccatcattacattcgatttcggaccttcaattaaaaaaccgtcggacagcgtaaatgatatgctggaacgcggatttcccgtttcctttgagcttgggatgacagcgattgtcattgctgtgatttctgggctggtgctgggcgtaatcgctgcactccgccgcaatggctttttggactacgccgcgatgagtcttgcagtactcggcatctccatcccgaattttattctggcaacattgctcattcagcaatttgctgtcaatctcaaactatttcctgctgcgacatggacgagcccgattcatatggtgcttccgaccgcagcgcttgctgtagggccaatggcgatcattgccaggctgacacggtcgagcatggtcgaagttctgacacaggattatatccgcacagcaaaagcaaaagggctttctccattcaaaattatcgtaaaacacgcactcagaaatgcactcatgcccgtcattaccgtcctgggcacactcgtcgccagcatcttaacaggaagctttgtcattgaaaaaatctttgccattccgggaatgggaaaatattttgttgaaagcattaatcagcgggactatcccgtgattatgggaacgaccgttttttacagcgtcattctgattatcatgctgtttttggtcgatttggcctacggtctcttagacccgcgcattaaactgcataagaaagggtgaagcgtgtgaatctccctgtacaaacggatgaacgccagccagaacagcacaatcaggtgcctgatgagtggtttgtcttgaatcaggaaaaaaatcgggaagccgattcggtcaagcggacgagtttgtcatacacgcaggatgcctggaggaggctgaaaaaaaataaattagcgatggccggactctttattcttttatttctttttgtcatggcagttatcgggccctttttatcgccccatagtgtcgtacgccaatcgctgacagaacaaaatcttccgccctcagccgatcattggttcggcaccgatgaactcggccgggatgtgtttacccgaacatggtatggcgcgaggatctcgttgtttgtcggcgtgatggcagcactgattgattttttgatcggtgtcatttacggaggcgttgccggctataaaggcggcagggttgacagcattatgatgcggattatcgaagtactgtacggcctgccgtacctgcttgttgtcattttgctgatggtgctcatgggaccgggactgggcacgattattgtggcgctgactgtgaccgggtgggtcggcatggcgagaattgtaagaggccaggtgcttcagattaaaaattatgaatatgtactcgcctcgaaaacctttggcgcgaaaacctttcgcatcatccgaaagaatttgctgccgaatactatgggggcgatcatcgtacaaatgacattaaccgtacctgccgccatattcgcagaatcatttttaagctttctcggcctcggcatacaggctccgtttgcaagttggggcgtgatggcgaatgacggcctgcccacgattttatctgggcattggtggcgcctgttttttccggcctttttcatatctctgacgatgtacgcgtttaatgtgctgggggacggattgcaggatgcgcttgaccctaagctgaggaggtagctgtatggaaaaagttctgtcagtccaaaatctgcacgtgtcttttacgacttacggcgggacggttcaggcggtcagaggggtgagctttgatttgtataaaggagaaacctttgcgatcgtcggcgaatccggctgcggcaaaagcgttacctcccaaagcatcatgggcctgcttccgccttattcggcgaaggtgacagacggcagcattctatttaaaaacaaagacctttgccgtctctctgacaaagaaatgagaggtataaggggagccgacatttctatgatttttcaagacccgatgacggcgttaaaccctacgctgactgtcggcgaccagctgggggaagcgctattgcgccacaaaaaaatgagcaaaaaagcggcacggaaagaggtgctttccatgctgtcattggttggtattccagatcccgaagagcgcctaaagcaatatccccaccaattcagcggcggcatgagacagcggattgtcattgcgatggcgctgatttgcgagcctgacatcttaattgcggatgaaccgaccaccgccctggatgtaaccattcaggcacagattttagagctgtttaaagagattcagagaaaaacgaatgtgtctgtcatcctgattacacatgatttaggggtcgttgcccaggtagctgacagagtcgcagtcatgtatgccgggaaaatggcggaaatcggcacgagaaaagatattttttatcagccgcagcacccttatacaaaaggactgctggcttctgtcccgcggctggatttagatggagcggagctgatcccgatcgacggaacgccgccggatttattttcgcctccgccgggctgcccgtttgccgcccgctgtccgaacaggatggttgtgtgtgacagggtgtacccgggccagacgatcagatctgactcgcacaccgtcaactgctggctgcaggatcaacgagcagagcatgcggtgctgtcaggagatgcgaaggattgaacatgaaaagggggaagaggatgaaacgagtgaaaaagctatggggcatgggtcttgcattaggactttcgtttgcgctgatggggtgcacagcaaatgaacaggccggaaaagaaggcagtcatgacaaggcaaaaaccagcggagaaaaggtgctgtatgtaaataatgaaaatgaaccgacttcattcgatccgccgatcggctttaataatgtgtcatggcagccgttaaataacatcatggaggggctgacgcgtcttggcaaagatcatgagcccgagccggcaatggcggagaaatggtctgtttcgaaagataataaaacttacacatttacgattcgggaaaatgcgaaatggacaaacggagatcctgtaacagccggagacttcgaatacgcgtggaagcggatgcttgatccgaaaaaaggcgcttcatcggcattcctaggttattttattgaaggcggcgaagcatataacagcgggaaagggaaaaaagacgatgtgaaggtgacggcaaaggatgatcgaacccttgaagttacactggaagcaccgcaaaaatattttctgagcgttgtgtccaatcctgcgtattttccggtaaatgaaaaggtcgataaagacaatccgaagtggtttgctgaggcagatacatttgtcggaaacggcccgtttaagctgacggaatggaagcatgatgacagcatcacaatggagaaaagcgacacgtattgggataaagatacagtgaagcttgataaggtgaaatgggcgatggtcagtgacagaaatacagattaccagatgtttcaatcaggggaacttgataccgcttatgtccctgctgagctgagtgatcagctgcttgatcaggataacgtcaatattgttgaccaggcgggtctctatttctatcgatttaatgtcaacatggagccattccaaaatgaaaacatcagaaaagcctttgcgatggctgtggatcaagaggaaattgtaaagtacgtcacgaaaaataatgaaaaaccggcgcgcgcctttgtatcgcctgggtttacgcagcctgacggcaaagatttccgtgaagcaggcggagacttgatcaagcctaacgaaagcaaagcgaagcagctgctagaaaagggcatgaaggaagaaaactataataagcttcctgcgatcacgcttacttacagcacaaagccggagcataaaaaggttgccgaagctattcagcaaaaattgaaaaatagccttggagtcgatgtaaagctggccaatatggaatggaacgtatttttagaggatcaaaaagcgctgaaattccaattctctcaaagctcatttttgcctgattatgcggaccctatcagttttctggaagcctttcaaacgggtaattcgatgaaccgcacaggctgggccaataaagaatacgatcagctgatcaaacaggcgaaaaatgaagccgatgaaaaaacacggttctctcttatgcatcaagctgaagagctgctcatcaatgaagcgccgatcatcccggtttatttttataatcaggttcacctgcaaaatgaacaagtaaagggaattgtccgtcaccctgtcggctatatcgacttaaaatgggcagataaaaactgatggcggtgattgaggaaatactgcttctttatgcgaaggagcggtattttttctctttcttgcacgtatacgtagggtgcagagcaaatgaaaggagtgttttcgttgaattacaagccgaaagcgttgaacaagggtgatacagtcggagtgatcgcgcccgcaagtccgccggatccaaaaaagcttgacaccgcgcttttatttttagaagagctcggtcttcaggtgaagttgggcaaggcgctgaaaaaccagcacggctatttagcgggacaggatgatgagcggctggcggatctccatgagatgttcagagacgatgaggtaaaagcagtgttgtgcgcatgcgggggttttgggacaggacgtatcgccgcgggcattgatttcagcttgatccgcaaacaccctaaaatcttttggggatacagcgatattacgtttttacatactgccattcatcaaaacacaggtcttgtcactttccatggcccgatgctcagcacggatattggccttgacgacgttcacccgctgacaaaagcgtcatataagcagctcttccaggagacggaattcacctatacagaagagctttctccgctgaccgagcttgttcctggaaaagcggaaggcgagcttgtcgggggaaatctgtctttgctgacgtctacactgggcacgccatttgaaattgatacgagaggaaagcttctgtttattgaagatattgacgaggagccttatcaaatcgaccggatgctgaatcagctgaaaatgggggggaagctgacggacgcggcgggaattctagtttgtgattttcacaattgtgtcccggtgaagcgagagaagtctctctcgcttgagcaggtgctggaagactatattatttctgcgggcaggcctgctctgagaggatttaaaatcggccactgctcgccaagtattgccgttccgatcggtgcgaaagctgctatgaatacagcagaaaaaacagccgtaatagaggcgggcgtttcagaaggggcgctgaagacatgaaaatcattcgaatcgaaacaagccgaatcgccgttccgctgacaaagccgtttaaaaccgcacttcgcactgtgtatacggctgaatcagtcatagtaaggattacttatgacagcggtgcagtcggatggggagaagcacccccgacgttagtgattacaggagacagcatggatagcattgaaagtgccatccaccatgtgttgaagccggcattgcttggaaaaagcctggcgggctatgaggccattctgcacgacatccagcatcttcttacaggaaatatgagcgcgaaggctgctgtagaaatggctctatacgacggctgggcgcagatgtgcgggctgccgctttatcaaatgcttggcggatatcgagatacgctggaaacagattatactgtcagtgtcaactcacctgaagagatggcagctgatgccgagaattatctcaaacaaggctttcaaacgctgaaaataaaggtcggaaaagatgatattgcaacagatatcgcccgtatccaggaaatcagaaaacgtgtcggatcagctgtgaaactgcgtttagacgctaatcaggggtggaggccgaaggaagcggtaactgccattcggaaaatggaggatgcgggcctaggcattgagcttgtcgagcagcctgtccataaagatgatctcgctgggcttaaaaaggtgacagatgcaacagatacgccgattatggctgatgaaagtgtttttacaccgcgccaggcgttcgaagttctgcaaacccggagcgcagacttgatcaatattaaattgatgaaagcgggcggcatcagcggagcagagaaaattaatgccatggcggaggcctgcggggtggagtgtatggtcggcagcatgatcgaaacgaagctgggcattacggccgcggcgcattttgcggcaagcaagagaaacatcacacgctttgattttgacgcgccgctgatgctgaaaacagatgtattcaatggcggcataacatatagcggcagcacgatttcgatgcctggcaaaccgggcctcggaatcatcggggctgcgcttttgaaaggggaaaaagagcaatgatgcacactgtcatatcagcagtggccaacatctggacagcgcctgattcacctcgtccgtctgatcaattcatgcttcaaccgactgtaatgatcagagactggctggagcgcatgacgtatgatgaacggcttggattatgtacagacaatgtaatccaaactcaggttctctttggcgaaaaggtacttgtgacggcggaacagggggaatgggtttctgtgatcgtgcctagccagccatcccgaaaggatccgcgcggatacccgggctggatgaaaaagtaccagctggaaaaaacaaagcccatccatacacaacacgatgtgatgatcagcaaacctgctgcctttttgtacagaagcaatggggaaaaggagatcgaattaagctttttgacagttctgccccttattgcaaaagaaaacggatattttaaggtttcgaccgtttttggggaaaggtttgtgaggcaaagtgatgcagtgcctgtcagccaacagaaagggactgctgaagacatcattcaaacgggtgcgttttttcttggccttccctacctgtggggagggatcagcgggtttgggtttgattgctccggatttatgtacagtatatttaaggcgaatggatacagcatcccccgtgatgcgggagatcaggctaaggcagggaagggtgtcccgcttgatgatatgaaagccggtgatctgctgttttttgcttatgaggaaggaaaaggagcgattcatcacgtcggtctgtatgtaggcggcgggaaaatgcttcattctccaaagacagggaagtcaatcgaaatcctcacattaacagagacaatctatgaaaaagaattatgtgcggtgcgccgctgtttttcagaataaggagggagacaaatgacgccactgcctttgttagaggtcagccagctaaaaatgcattttgacgcagggaaaaagcggacagtcaaagccgtcgacggggtcacctttcagattcgtgaaggagaaacgttcgggctagtcggggaatcagggtgcgggaaatcaaccttggggagagtgctgatgcgcctttatcagccgacagaaggaagcgtgacataccgcggcacaaatcttcatgcactgagtgaaaaagagcagtttgccttcaaccgcaaactgcagatgatttttcaggacccttatgcttcacttaacccgcgcatgaccgttcgagaaattattttggagccgatggagattcacaatctctacaatacccataaagcgcggcttctcgtcgtggacgagctgcttgaggcagttgggcttcaccccgattttggcagccgttatccgcatgaattcagcggcgggcaaaggcaaagaatcgggattgcgagagcactgtcgctgaatcctgaatttatcgtggcggacgaaccgatttctgctcttgatgtctctgttcaagcgcaggtggttaacctgctgaagcggcttcaaaaagagaaagggctaacgtttttattcattgcccatgatctttcgatggtgaagcatatcagtgacaggatcggtgttatgtacttaggacacatgatggaaattacagagagcggcaccttgtatcgtgaaccgctccatccctatacaaaggcgcttttgtcctcgattccgattccggatcccgaattggaggacaagcgtgagcgtattctcttgaaaggggagctgccgagcccagtgaatccgccgagcggctgcgtgtttcgtacccgttgtccggaggcgatgcctgaatgtggagaatctcgtccccagcttcaagaaatcgaacccggccgttttgtcgcttgccatctgtatcgaaatgctgaaacgaaggaaaaagtgagataaataaaaagagtggctcctttttactagagccactccatttgtttatacttgatgtaaaaactttacacaaaccgggtaagggacagaaaccgttgatgggaggagtgtcaatcggccggtttctttgtctctttcaaacaagacaaggttgcctgtttcttcatttgaagcaacgaggaacccttccgttgggtcaaatacaaagtcacgaggccagtttccttctgtcgacactctttctacgaaagccagctctcctgaatattgattcacttcaaatacggcgatactgtcatggccgcggtttgcgacataaacaaaacgtccgtcctgcgtgacatgaattgcgcttccctggctgttatctgtaaaatcatcagggatggcagaaacgacttggatttctctaaattcgccggctgtcgggttgtattcaagcgcaatcacttcattgcttaattctgtcatgacataagcgtatttttctttcggatgaaaagcgatatggcgaggtcctgcaccgggagcgaaggaatggcttccggattcagtcaacacaccgtctttaagcttataggtgtagagcttatctatacctaaatcaaccgctaccacataattgtgttcaggtgtgaaccccgcgtagtgtgtatgcggtttttcttgtctttcgtgcggcccttttcctgtgtgagcggcctctgaaacaggtgattgcaagctgccgtcttcctgaaccggaaaaacgtgtaccttcccgctgtgataattggcagtcaggacgaattgattttgatcatcaatgcttacgtggcatggcgaagggccatcaattaactgatgattcagaaatgtcaattcgccgctgtttttatcgatttgataggcagcaactccgccttggccgtctgctttttcgatggaataaaggatggtgttgtttttattcggcgccacatatgtcgggttgcccagcttagcggccagctttggctcgctgagtgcttttttctcagtatcaagctcaaatgaataaattccttcgcttccgccttttgtatatgttcccacatatcctatgtattttgtcatgcgatttcccccttaaaaatgatgtcacctctatattaacgtatcttgataaaataagctgttcaaaacatgaaaaaggggaagattcttcattcgcctcgaatcagcggcattgtgcagcacctgaaggagccgcctgatttaataatttctgacaggtcaatttcgataatgtgatagcctcttttcgatagctgttgattgacatggcggttgccagggagactgatgatcgtttttttttcgattgaaaggacgttggtgccaagcgtaaattgttcgtcctcgggcacctcaataagatcataacgttttgccagcatatcggctgcaactggctcaatggcctgtggataaattaacgcttcgctttcagatataatgttaaatacgcagtccaaatgcaaaaatttttcatgaagcttcactggaacgatcgtatattcaggaagtgcctcttccagctggccgatagctgaaatgtcggtgcgctggctgattccgacatagacaatgtcatcatcgataatgacgtctccgccttcaatactcgtatcaagcatgcgggtgtaagagataccttggctgtgaaaaaaatcttttataacggcttcttctccttggcgaatcggttcagtcatgcttgacagaaaggctttttctccgatgacaaatcctatgtccctagtaaaaacctgctctggtagtccgtcgcgaacgggcaaaaggacgacctcaacgttgtgtgacctaagtgcctccactaagcggctgtgctggtcgttagcggtttttacatgaatattgtcatcttcaaaatgtttttgtgtttcgtttataacatcttttatggtcatgtgctcaggtttgcataagatcactttctgaagtgtgccgtattccgttcggcataccgttttgtgctgagatttcgggatggatacgtccatttgtttttcctcctaaagtgtgaagaatacatttattattccctcatcatgaaaatcattaaaccattttaaattttagacaaatggaagagaatattgtttaataggagaatataagtgcatttagctaaaagatcagacatcaaaggggagaaaggtatggaaacaccggaaacaagattttgtaaagagtcaaaggttgtgaaaaccagcagggtgttcccgcttgacacgaacaaccataatacgctgtttggcggaaaattaatgagctacatagacgacattgcctctatttcagcggcgcgccattgcagacgtgaaacggtaacagcttcaatggattctgtagattttttaaagccgatcgggcaaaaggattctgtctgcctagagtcatatgtgacatgggtcggcacatcttccatggaagtatttgtgaaagttattaaggagcatttgatgactggcgaacgggaactcgctgccacatcctttttgacatttgtcgcattagattcaaatggcaagccggtgcctgtaccgagggttgtaccggaaacagaagaagaaatcatgctgcataatacagctgtacagcgtgctaatgaacgtaagaaccgcaagaaacacagccaggcgcttgcgaatgcgcttggaactgataagccttggtgaacgttaaacccaaaacataagttgttttgggttttttttttgtacttttcaatggtgattattgcaatggttagtccgtttttgctaggggattctataaaaaagcaacaaatgtcatgttaaattgataattttgtgacaactttattaaagattcattttagatatatcttttattcgtaagatcatgtattttaaagatatattatgaatacatcttttcgaaaggattgtttataaaatgttagataacaaaacaatcgaaattattaaaagcactgtacccgtattgcaacagcatggagaaacaatcactggccgtttttacgatcggatgtttcaagaccatccagagcttttgaacatttttaatcaaacaaaccaaaagaaaaaaacacagcgaactgcactggcaaatgccgttattgcagctgcggcaaacattgaccaattaggaaacatcattccggttgtcaaacaaatcggccacaagcaccgcagtatcggaattaagcctgagcactacccaatcgtcggtaaatatttgctgattgcgattaaagatgtattgggagacgctgcaacccctgacattatgcaggcatgggagaaagcgtacggagtcattgctgacgcgttcatcggaattgaaaaagacatgtatgaacaggcggaagagcaagccggcggctggaaagagtataagccattcgttatcgcaaaaaaagagcgggaaagcaaagaaattacatccttctatttgaaaacggaagacggcaagccgttacctgaattccaagcagggcaatatatcagcatcaaagtgcggattcctgattctgaatatacgcatatccgccagtacagcctgtctgatatgccgggaaaagactattatcgaatttccgtgaaaaaggatggtgtcgtgtcttcctacttacacgatgggctgcaggagggagattcaatagagatcagcgcaccggcaggggactttgttttagatcatgcatcacaaaaagatctcgttttgatcagtgccggagttggcattacaccaatgatcagcatgctgaaaacatctgtttccaaacagcctgaacggcaaattctgttcattcatgcggcgaaaaacagtgaatatcatgcattgcgccatgaagtagaagaagcagcaaaacattctgctgttaaaacagcatttgtgtatcgcgagccgacagaggaagaccgtgcaggtgatctgcattttcatgaaggacagattgatcagcaattcctcaaagaactgattgccaacacagatgcggattactatatttgcggttcaccgtcgtttattacggcaatgcataagcttgtatcagagctcggaacagcgccggagtctatccattacgagctattcggcccgcaattaagtttggcgcagtccgtttgaacacatacatgaaactcttctcctttcagagaagagttttttattgagatataagaaggcagacaagcgccggtttctacatccggacaatcacagacccttgccatttgtgcatacacggttttgctgttcttgcattgttttcagcaattcattgtttacctcaatcgctctaattagttgctccatccttagctccaaaccggccagcctgtcgattgtttgctgctggtagctctcgggttggggagccaaaggcagatcaaagggccaaagggtattcgacttctgatttttcatattgcgtattgcgcctccaatcggtgtcactttctattatgttatgttcaggcgatatgcacgttcgcctagacactgatgcatagagggcctgccacggggtacaataggctcaatatgaccagcggatggaggtaaagatcggtgttatggatggtatgggtatttttactgaagccagttatcgtattttcgattgcatatattttgtttcggcttgccggtaaaaaagctgtgtcacaaatgaacaattttgacctgcttttgaccttcgcaatcggaaccattatcagtgagccgatccttacatccaagctgccgatgtcaatttattatgcgggtgcttttttggtgctttatcttatcatgagcaagctctctttatctaataaatggcgatggctcctagtcgtgagcccgactgtcctaatccgaaacggggatattgatgaacgcggccttcgtaaagaaaggctgactgttaatgagctgcttggaaagctgagggaaaagggctatgccgacccggctgacattgatcttgctatcattgaagaaacgggagaagtaagcgtcatcccgaaagaggaagcgagagcggtgcaggtgcgggatttaaatatggaagctgaacggaattttatcccgattccgctcatactggatggcgaaatccttgatcataatttgaaatatctccaaaaaaaccgatcctggctgtttgagaagcttgaggaaaaagggtacagccccaaactgctgtcttcgattacccttggcacgatgaatgcacgcggtgatatatcccttgatttaaataccgctaatgaaccgcagcatgatccttacttatataaaccgggaaataacaattaagatggctctctcttgtaatgagagcttttttcttttttaaagggaatttttgtttggtgtcaaatgtacctagttaggaggggaactgaacatgaaggacttatccataagaaacgacatggcgccaacggtcagtttgctgtattccgcagtggaagaaaacagtctccgtctggcttccatcgtaagccatatgacacacagtgaactttactataaggggcgctgccaaacaaaaaacagcacggctcagcttttgcaccatatcacaaatgttgatatcagatgggtctggcgtatcaaggaaaatcggatcccggaccatattgaacaggcatacggcccgatgacagatgaaagcggacggctgcctgaaccggtgaatcagccaaacttagatgaactcctgaaaagacatcagcatgtagtagagaagctgaaatcggtatgcttcactttaactgaaaatgctttgaaccagccgctttccttcgaaggtgacaccgcgacgatacgatggggaatttggcatatggcagatcataaccgctatcatcaggcacatattgaagctctcaaaaaagaatggaagcaggatgtggcgaagtatgaacgctaaaacgaagcttgtgactgatcgaattcgtttgcgctgtatggaagatcgggatcaagccactttgtttgggctgctttttaatgatcctgacgtcatgacatattattccggtttaaaagataagaggcaaacccgcgagtgggtcaattggaaccaacgaaatgaaaaagggtacggcgttagtctgtggatcgccgaagataagcggacaggggagtttttggggcaatgcggcatcgttccccagcagatcgaaaatcaaaccgtaatggaaattggatatatgtttgcccgccgccactgggggaacggctatgcgcaagaagcagctcgggcctgtctggacatggctttaacgagcggcagttcggcaaaatgacggctttgattgatccgggtaacaaagcgtccatacgggtagcggagaaaatcggcatgcattacagcaaaacgatcagaaaatggaataaaccgatcgaggtatatgaaagaaaatcttacaattgaaagatagagctcagtttagtatcatgatatcatgtaaagttttctagggttccgcatgtcaattgacatggactggtccgagagaaaacacatacgcgtaaatagaagcgcgtatgcacacggagggaaaaaagcccgggagagtcaatctcatgtgagacgactgtccggggtttttttgttttcggagaatcctaatagatagaaaggaatgactcaaaatgaaatggggattggtcgtgcttgccgctgttttcgaggttgtttgggtgataggcttaaagcacgctgactcagccttaacatggagcggcactgccatcggcatcatattcagcttttaccttctaatgaaggcgactcacagtctgcctgttggtaccgtgtatgccgtctttaccgggctcggcacagcgggaacagtacttagtgaaatcgttgtttttcatgaaccggttggatggccgaagctattgttaattggtgtgctcttaatcggtgtaatcgggttgaagcttgtgacacaggatgagacagaggaaaaaggaggcgaggcataatgctgcactggatcagtttattgtgcgcgggctgtttagaaatggccggcgtggcccttatgaatcaatatgcgaaagaaaaaagcgtgaaatgggtgctgttgatcattgttggttttgccgcttcattttccttgctgtcgtacgcaatggaaaccattccgatgggaacggcttacgcggtctggacaggaattggcaccgccggcggggcgcttatcggcatcctcttttacaaggagcagaaagacgccaaacggatcttctttatcgcgttgattttatgctcagcagttggtttaaaaattctgtcataaattgatttttatcaaatcttcagtataatggataaatagtttagacttacaaagataagagggattattcatgaaatcatatatgactcagcggttggacgaataccgtgacggaaatgaggataaagggcggctcttggtcagctgccccgatcagccgggtatcgtctctgcagtttccgcgtttttatttgaacacggtgccaatattatagaatcaaatcaatatacgacagaccctgaaggcggccggttcttcctgagaatcgaattcaactgcgcaggcattcgtgagaaaaaaacatcacttcaggcggcgtttgcctctgtagcggataaattcgacatgacatggagcttaactttggcaagtgaattgaagcgtgtcgccatttttgtttcaaaggagcttcattgcctgcatgagctgatttgggaatggcaaaccggcaacctgatggcggagatcgctgttgtcatcagtaaccatgagggagcgagagagctggttgagcgcctgaacattccattccactatatgaaagcgaacaaagacatcagagcggaagtcgaaaagaagcagcttgaactgctggagcagtacgatgttgatgtcatcgtgctcgcacgctatatgcagattctaactcctgattttgtttcggctcatccgaatcgcatcatcaatatccaccattcattcctgccagcttttatcggtgcgaatccgtacaaacgggcctacgagcgcggcgtgaaactgatcggtgcgacatctcattatgtgacaaacgatcttgatgaagggccgatcattgaacaggatattgagcgtgtggaccaccgcgataatgcggaagcgctgaaaaacatcggaagaacaattgagcgcagcgtgcttgcccgtgctgtgaaatggcatttggaagaccgtgtcatcgttcatgaaaataaaacaatcgtctttaactagactgcaagaggcccgcgcaatgcgggctatttttgatgacaaaaaaccttgacaagtgtcttttttctttgcataatataaaaaaatcattgagcgttgaagaggattagtaagcagacctttctgtgacagagagcaaaatgaatcgctgaaacattttgccgcatgaaacctgccgaacctgccttggagtcctagggggaaaacctaggcgcataacctggcgttacaggagagcggagcgtgcacaagcgcgttcaatcaaggtggtaccacggaaacccatttcgtccttatgaatcaggatgaaatgggtttttttattgtagaagagccgcggaggagaataaatgaaaaaacaaagaatagtagtgaaaataggaagcagttcgctcacgaatagcaaaggaagcattgatgaggcaaaaatcagagagcatgttcaggcgatttccgtgttaaaaaaagcggggcatgaaatgattctgattacctcgggtgccgtagcggcggggttttccagcctcggttatccgtcccgtcccgttaccatcaaaggaaaacaggcggcggccgcggtcggacaaacactgttaatgcagcaatatatgaatcaatttaaacaatactcattaactccgggacaaatccttttaacgagaaatgatttttcgaaaagagaacggtaccgaaacgcgtatgctacgataatggaattattggaacgcggcgtcattccgattatcaacgagaacgattctacatctgttgaagaattgacattcggagataatgatatgctttctgcgttagtcagcggattgattcacgcggaccagctcatgattctcaccgacattaacggactgtatgatgccaatccaaatgaaaatcctgaggcgaaacgatttgattatttgccggagatcacgcctgaattgcttggatatgcaggttcagctggatcaaaggtcggcaccggcggaatgaaatcaaagctgttagccgcacaaaccgcgttgtctctgggagtgaaagtattcattggaactggcagcggagagcaaaaacttgcggacattttggacggcaggggagacggcacttatatcggagacaaagaactatcttcggttaacaacacaaggcagtggattcagttccactcgccgatatcgggagaaattatcattgatgcgggtgccgaggaggcgatgatccataatggaagcagccttttgcccgctggcgttgtgggcgtgaacggaagctttccgaaaggggcggtcgtggaagtcaggggaccgggcggcgtgatcggcaaaggccaaacccattactcctctgaggagattatggaggccaagggcaaacgcagtgacgaacttgattttgagaaaacgtttgaggttattcataggaatgactgggtcaatgtaaaagactaggaggcggaaaaatgagtgaagtttctgtaaaagcgaagctggcgaaagaagcagcagccgaaatgatcatgaaaacaacaaccgagaaggatgaggcgctcagcctcattgcaaacggactccgtaaagaactggattttctcttggcggagaatgcaaaagacattgagaatggaaaagagaatggtttaacaccggacatcattgaccgtctcacattggatgagaaacggatacgcgatatcgcggacgcggtggagctcttaatcgacttagcggacccaatcggcgactctcttgaaacgattgaaaaagaaaacggcctgtttattgaaaaaatccgtgtgccgctcggtgtcgtaggaatgatttatgaggcgaggccaaacgtcacagttgatgcggctaccctttgcctgaagacagggaacgcggttgtgctgcggggaagctcctcagccatccacagcaacaaagcgctcgtcagtgtcattcacagagcacttgagcaatcagcgcttccgattcacgctgtgcagctgattgaggatacgagcagagagacagcaaaagagctctttacgttaaatgatggcttagacgtattgattccgcgcggaggcaagaaactgattgatctcgttgtgagagaatcaacagttcctgtattagaaacgggagcaggaaactgccacatattcattgacgaaacagccaaaccgcaaatggcagaaaaggttgtcgtaaatgccaaaacgcagcggccttccgtatgcaacgcgattgaatcattgctgattcacaaggcatgggcaagacagcacgggaaagaattgctggcccagctggaaaacgcgggagttgaaattcgcggtgatgaacttgtatgtgaacttcacccttcaagtaaacaagcatcaaaagaagattgggaaaccgaatttttagcgcctgtcctcagcgtaaagacggttgaaaacgtccaagaagctgtgaagcatatccaacaatacggcaccaatcattcagaagcgattttaactgaaaatgacaaaaacgcggcatattttcaaacggctgtcgatgctgccgcggtctatcataacgcgtcaacccgctttaccgacggctttgaattcggctacggagccgaaatcggcatcagcacgcaaaagcttcatgcaagaggaccgatggggcttcctgcactgacttctacaaaatacatcattaaaggaactgggcaaatccgtgaatagcggggcaatgttcaatgaaaaagcttatctcattacgagataagcttttttatacgcgaaaaattgacatttcaaatttaattgtgtacaatttaattgtataaaatatatcgggggaatgaaaaatgagtcagccattatttacagcaactgtttcagcggtaggaggaagagaaggaaaggtcatttcatcagaccgcgttcttgagcttgatgtcgcaatgccggggacaccgagagccaagaaattagaaaaagcgacaaatccagagcagctgtttgcagcaggttatgcagcttgctttgacagcgccctgcagcttgtcgcaagaacagaacgggtaaaagtagagacagaggttacagcgaatgtaagtctgttaaaggatgaagcggaccagggctacaagcttggtgtgacgctgcaagtaaaaggagaaggagtcagtgcatcagaattggaggcgcttgtgaaaaaagcgcacggcgtctgcccgtactcaaaagcaacctccggaaatattgatgtgacacttgaagttgctgaataaataaaaagaggatgcctgtacaaggcatcctcaatttttttgatgaagtgtttccagcaatgtatatagagcggattttaactgtttgagatcctccccagactgctttgagagccccagaattgtctctggaatgtcaaccgctttttcttttaataacgctccgtcctctgtcaggctgatcaacacggaccgctcatcctcttcagatctttttctcgtaatcaaaccctgttgttccattcgtttaagcatcggagtgagcgtccctgaatctaaatacagctgttcgcccatttttttgacagtaagcgtttcatgttcccataacaaaagcaaagccaaatattgagggtatgttatattcagcttatcaagcagcggcttgtattgctttgtcatttcccgcgaacttgcatatagcaaaaaacatagctgattctccaatttcatatgatcaaatttattttccattttgttcaccaactcttttttgtcattcgattctattgtatctgaaaaacctcacttttcctattctcggcaaacatagcatgtttaaaaagattagaaagggaaatataacaactagatacaaataaggaggttgggaaatatggcactatttacagcaaaagtaaccgcgcgaggcggacgagcaggacatattacatcagatgacggtgttcttgattttgatattgtcatgccaaatgccaaaaaagaaggacgaaccggcacaaatccggaacagctctttgcggcagggtatgctgcatgcttcggcggcgcgctcgaacacgtagccaaagagcagaatatcgaaattgattcggagattgaagggcaggtcagcctcatgaaggatgagagcgacggcgggtttaaaatcggtgtcacacttgttgtgaacacgaaagatttagatcgggaaaaggcacaagagcttgtcaacgccgctcatgaattctgtccttactcaaaggcaaccagaggaaatgttgatgtaaaactcgaattaaaataatgaccggcatcctgagtgttctcaggatgtttttttggtgtcggagcatgcggggcgggcacagatttatgataaaacttcagagaagcgtttgaagcatgcctttaaaccaaaagttacagatgaagcgggtggctggcacggtgtctgccgtgctgaattgcgcgtatatgctgttttgtatttgcacagggcatagcggctacttggagaaataacaaggaccaggccgcgcatgcctgatccttttaatattctttcttattggcgaagttccgccatgcttgaaacggggataaatgctctgttagtgtcacttgataaaaggggatcgttctttcttcagcaggtttatcaatttctttataaatgaatgaatcatcaaacccggcttcggcagcgtctgtgtgctcagctgcatagaaaacggctttaggccgggcccagtagatggcgcccaagcacattgggcatggttcacagctcgtatacaaaatgcagtcatcaagctggtaggctcctagcaccttacaggctttccgaatagctgtgacttccgcgtgggcagtcggatcattgcttgttgtgacgttgttctgtccttctgcaataatggctccgtctttcacgataacggctccaaaaggcccgccaactcctgcattcaccccatcacgagcaagatcgacagcccgctttaagaactttttatgattcatcccaaaccctcctgtcagttgagtgttataagtatagccgaaaaaggggcaaagaacattctcaaaaaagtgcaaaataaacaaagtatttgggggatttgctaagataagaggagaaaagaggaggggtaatgatgctgcatttatatattgccaggcacggacagacccaatggaacgtggaaaaacggatgcagggctggctggattctgatttaacagaacttggactgtataacgcccgcgctcttggggagcgtctgaaggatattgaattgaatcaggtatacatcagcccgagcaagcggacagaagagacagcaaaaaccgtactgggatcgcggaggctcccgctggttaaagatcatatgttcagagaaatgtcactgggctcatgggaagggaaaaaacaagaagatattgaaagggacgaaccagatctttttcatgcttattttcattatcccgaagcttatcgccagcagggatgtgaaacgttttttgactttgaaaaccgggtaaggctggctctccaaactattttgagccttgtggaatttgatgaaaatggaacagccaaaatattaatagaaggggacgggaagcatcggaaaccgatttccgctttctaatagaaaaaaccatctgccaaagacagatggtttctattttatacaagctgtgtctgctgtgctctcgcctgttttgcggcttcaaccatgtttttcaatgcggcaaccgtttcttcctgctgtcttgttttcaatccgcagtccggatttacccagaagcggtcagtcggacagacggcaagcgcctcaacaataatgttgtacatttcttcagttgacggcacacgagggctgtgaatgtcatatacaccaaggccaagccctttcaaatacgggtggtcttttaagtaatctaaaaatcctccgtggcttctgctatgttcgattgtaatcacatcggcatcaagatcattgattgtatcaacgatatcttcgaagttgctgtagcacatatgtgtatgaatttgtgtctcgtttttcacggaagaagtggttaatctgaaagcttctgccgcccaagtcaaatactcatcccaatcgcgggttttcaatggaaggccttcacgcagcgctggttcatcgacttgaatgatttgaatgcctgcgtcttcaagcgctttaacttctttgcgaagggcaagcccgatttggaaggcgatttctttcctcgagatgtcgtttcgagggaaagaccagtttaagattgtaaccgggcccgtcagcattccttttacatgcttggaagtcaatgactgtgcgtagactgtgtctttcactgtcatcggttcaataaattcaacatctccgtaaatgactggcgggcggacacagcgtgagccgtatgattgaacccaggcatatttagtgaaggcgaaaccggccagcttttcaccgaagtattcgaccatgtctgtccgttcaaattcgccgtgaacaaggacatcaagctccaattcttcctgaatatcaatccatctttttgtttccgcattgataaagttttgatactgttcatcggaccactcagctttccgccatttttggcgtgcgctccgcacttcagcagactgcgggaagctgccgatcgttgtcgtcggcaaaagcggaaggccgagagattcattttgcagggctaaacgttcttcaaacggaatcggacgcttgaagtctttatcagttaattgctcaagctctttcttttgttcagaattggcgcctgttgcaaactgtttaagcgcctggatatcagccttagcctgctgaatctcttcgctgatcgccgcttttcctgatactaagccttctttcaaagctgttagctcggccagcttttcttttgcgtaggataatccgttcaataggtctttttccaaatgctcatcagggtgtttcgctactggaacatgcagcaggctgctggaaggctgaatccacagttcatcaacttttgcaatgctgagaatatcaagaacagcatcgagacgctcttcaaggtccgctttccaaatgttgcgtccgtcgataacgccggctgccagcactttgtctgtcgggaagccatgtgttttaagctgttccaggtttctgcctttgtcgtgaacgaaatcaaggccaattccctgaaccgggtaagagatcagctcttcataagcatcaacagaatcaaaatacgtctgcaaaagcacattcaaggatgaaagctcacttgtaatgctttcaaataattcttttgcaccgcggacatcttcactagaggcggtaacgagcgccggctcatcgatttgaacccattttacgccttcttcttcaagctctttcaaaagctgtacatataatggcacaaggcgtttttggatcgcttttgcttcagacggttcatagcctttagcaagcgtaacgaacgtataagggccgacaatcacaggctttgtttccacaccgtattcctgtttgatccggcgataatcttcgagttgtttgtttcttgtcagacggaactcaatgctctcgtcatattccggaacgatgtaatggtaatttgtattaaaccattttgtcatttcactagatacggcgtctttgattccgcgggcgatagcgaagtatgtatcggtagcgtcagtcaaatgtctgaaacgtttcgggatccagttgaagctgactgctgtgtcgagtacatggtcatactgtgtgaaatcagaaacaggcacaacatcaatctgctggtcaatttgtgtttttactgcggataaaaatagttcgtcgctttgcttcaaaaacgtatctttatcagtactgcctttccaatacgcttcaagtgcttttttccattcccggttcagtccgattctcggaaatcctaaattcgatgttttgatggttgtcattgtttctcctcctttatatgtaaaacactctctttcacccgcggatacaggctgctaagaggttttctcacaacaaaaagcctctttcccatgagagaaagaggcttttctacgtaaaacactgcctctctcatctctcagacacaatctgatggaattagcaccgtgccttatgagacatcagtctcggcgcgaaaagcagtgcgccccatttcacaatggtattacggtcggttgctgttggggtcaaaaggccaatccctcgcccaactctcgataagagaaaatgttattaattttttgaaaagttgaatcatttgttggtaatcttaacagtaattcaaattcattgtcaacatagaatttgaaatttttatttatatgatgtggtgtatattatataagaaaaataatcttatagggttaacaaatgtgattgctctgctttttctgcgagttcatcaggagctgttaaatacaggaatccattgcctgccagcgtttttgcaatatcaagaggaagtgtcctgcggattagctgtgcgaaaacctcagattcagaaagctttctttgaaatgattcttcttcatagcttttgattaaagcaagcgcaccgctgacatgaggggcagccattgaagtgccggtcagcttaccgtacttcttgttgggaagggtggataagatattttctcctggtgccacaaggtcaatctctttatttgcgttagaaaattctgataattctcgtgctactgaaacagatccaactgcaatgacttcgttataagctgcggggtaggaaagctcttctgtgcgttcgtcgccgtcaccctcatttcccgctgcacaaacgacaagcactccgtttttgactgcgtttttcactgcttcttccagctctggcacatcgcttggccctccaagggacattgagatgatgtcgactttctgttccaccgcgtagttgatgccgttaattatccattcgtattgtccgctgccgttctcgccgccaagaaccttcacaatcaataggcttgcctcaggcgcgactccggcaatgcctccgtttgaatcattagctgcaattgttccggcgacgtgtgtgccgtgtccgttgtagtcggaaattgcatcttccttgccgccgtcgtcatccgtgaagttctttccgccgatgatttgattttttaaatcagggtggcttgtgtcgcagcccgtgtctaatacagcaactttaatatttttgccttttaccccttttgcccacatttctggcgccttaatcactttaatgccctcaggaagctcgtttacatccatgatctgctcattcgtcacatacgggatcaagcggatttcaccattcataaaaaagccctccttttttatgctttcaagtggattcaagggtgttgcctcatattatatgaaaaaaacaagcgctcggacagagccatttgaagcattttgaaaaaataggatacacaccaaagaattagtaattttcaaaatattggatggcttcggcgtgtatgactgggattcaactgtaagtcaagttataatagtgttggggaaaggagcagtgtcatgaaactgaatgaaaaattatatgcatttttttcagagcatgtggaacaaatggccgaggaatggattgaaacgatggaggaaagtgatccgaattcgctttacgccctacataatgcaacagtaacggaagaattgaaagagcaggacagagaattttaccggcatctgaattacatgtatgttttaccggaaaaacaatttctcgaagagtttcaagagtgggtcattgagctgaccaacgatcaaaaacatctcgacacaccggttcagtatgtcattcgggagtttatgagaaacaggagattatatacgaagtattttgagaagttcgcagaagaaaatgagtcagcgtttgaaccgggagagaagcaaaaatgggcagatttgattgtaaaagtatttgatttcaccatttatacattcgttgatcacgctgaaatgaatgccaagcagcaattaaacgcccaaagagaaatgatattggaactaagctcacctgtcattaccctgagcaaatcaacagctctgctgccgcttgtcggtgacattgataccgaacgggcgaagtttattctggaaaacacgcttcaagcttgtgcgaaaagacgtgtggagcatctgttaatcgatctgtcaggtgttgttgtggtggatacgatggtggcgcaccagatctttaaattgattgaggcgcttaatctgatcggtgtccggtcaaccctgtcaggaatcaggcctgaaattgcgcaaactgctgtacagctggggattgacttttcgaatattaccattaaaaccaaccttgcccaagcattaaactatcatcaataaaaaaatccgctatctgtgatagcggattttttatgatgcgaaacataaagatacgagaaaggatcccgcgaataataagaggacgaggcaaaagaacacccagtcgcgccggttcacgctcaatttcctataatatgtccggtttctgcttcctgtaaaacctttcgattccatcgcaagcgctgtccgttccgcttttctgatggcgcttgccaatagcggtatggtatatcgttttaacgcactgattttcttaatgatgccgctctccgccgctcctcctctgattttatgagcctgctgaatcagctggatctcatcctttaacagcggaagaaagcgaaagcctgcaatgacaccgtacgcgagctttggtgagagcctgcactgctggacaaggctcagcataaataaaatcggatcggttgtaaaaacaaacatcatcgataaggcggaaaagcataaaatacgaaacccaagggagatgccgacagacacattatcgctgttaattgagatagggcctgcttgaaacaaaaaattattcggtgttgtcggcacctttccaaaaactgcggctgtccacacgcacccgaatgctaaaatcaaaaacggaatcgtaaacaacaaccattttttcaatgggattccggccgccagtagaacgcccgcaacgatgatgatataaaaacatgccggagtgtaagggttgtaaataaacgacagcatgacgacacaacaaaaaaccgccgccgctttcacagtcggattaatgagatgtaacggctgcttcatcacgcacctcctcttgatatgccatccattcatatagaaggggaagggtgagctttgctttttggacaagccctgtttcttgagaaaacaactgcgctggagatccgtcaaaggccaggcctgtatcgtgaagcacaagcacgctgtcagcatacgaagagactagctccatatcgtgtgtaatcataaggacagcggttccctctgtcttgatacgctgaatcatttccatgcattcagtcaccgtgcgggcatcctggccaaaggttggttcgtctaataataaaacctttacgttatgcatgagcatagtagcaacgctcagtcgccgtttttgcccttggctgatcgcaaacggatgatgatcagccaaatgcgcaagaccaaaacgctgcagcaggtgttgcgcttttttctcagtttcagcatttgctttctggccgaacagaagctcgtcatataccgtatcggtgacgaattgatgctcagggttttgaaaaacaaatcccatccgtttacgcaattctttttctttatatttctgcagcggctgatcatagagaaggattttgccgctttgcggtttcatgagacgggccagaactgataggagcgtcgattttccagttccgttcggaccgacaagcgccgttaaagagccttcgcgcaacgaaaagctgatgtctttgaaaatcgcctgctgtcctctcgcgaacgaaaggctgctgacttcaagcacactctccccaggaggggctttcttctttttggcatgcccggcaggaataggctctttgaacagcatctcttttgataaagtaaacggcatactcagcttttcctgcagatgacagacctttggaatggcgatgcccaatttctttagtgtttctgcttcatgctgaaatagatttttcgtcaggccatccagcgcttttttgcccgatttgtcgagcacgatcgttctctcaatccaaggcgcccattcatcaagctggtgctcaatgacgaggaggctgaaacctttttcccgctgaagatccttcatcagatgaacgaactcccgcgctgagaaagggtctaaaagagaggtcggctcatctaaaataataagctcaggctccatcgccaaaatacaggcgagagccactttctgcttttgtcctcctgaaagggttgagatcattttttcttttaaatgggtaatgcgtaatttttctaatacggcgttgattttctctgtcatttcttcttttggaatttgcagattttccagcccgaacgctatttcgtcctccaccgtcagcatgcagaactgctgatcaggatcctgaaaaacgaccccggcatgctgagcaatcgtttcggaggtttcagcatctgtgaccggctgttgaaatagaaagacatgtccggactgaatgccgtcgcaagcctccggatatagaccgtttaaacaaagggcgagcgagcttttaccgcatccgctcggtcctaataataatacacattctcctttttgaagctcaaacgaaatgtcttgaaaaaccggtttctcgtcttcttcataagagaagctgagctgctcaaccgtcagaagctcatcaaaggcttgcatgttctgacgcccgcttccgtttctttttcagttcctttccgagtgccattccgtttaacacacctgtataagcgagagagtcgctgacagcttttccgagaagccccgccaaaagcgcgccggaaatgaggcggatcacaagcataatgagcagataacctggtgaataggctgcatagccagaaacaaagagatcatagataaagctggctactgaagaccccataccggccagcataaggacagggagagagtatgctttccagcgtgttgcaagaaatacagcctcagccccgagcccttgaacaatgccaatgacgatgaccatcgggccagacggatttcccagcaggcactcaacgagagcggcaatgatttcagaaacgagcgcagcacccggttttcgaatcatgtacgcggcgatcacagaaacgataaaccaaatgccgtaaatcggttcataggcgattggcccaaacatacctgcaagtacgtttccgaaatgtgtaaataataaataaacaacggcaaatacgatactgataacggacatgatgacaatttcttttactttccagcttttcatgttatccctgctttctgttttttcttgatggactgttagccgaaagattcacagtcatggtgatgtggtttgtttgctgctcagccatgcggaaaacggcttccaatgtgctgaatacgtcatgcgcatccccgtcaagctcgctcgcgtaatggacaccctgtacgaaagtgccttgggcttttgcaatgtcgacagccttcataatcaatcccatataatccggctcgttcattggataaagggcaaattggcacggcgcttccgccttcaagcctcggacagcatcttcattgacacgcttatcacctttggaaagatatgtatccccctgtgtgtcacccgggcatccaatggaaaacgtgccgttcatgacgatgtgtttttcgctgtttgctgcatgaaggtaaatggcttttgcagcatcgaatacatgatcaatcgatccgcgtaacaccgtgctgatatggtcggttttcgtccataccttggatgtatctgtttttttcaacgcagacttgatcacactgataaaatcatccgtcatcggatataaagagaagcgaaaaccggcgattctgcttgtaccgcaaatatgctccattttctccgacctcctgtttttttggtaaaataaaaaactgcatatcctaagggaatatgcagtcatagatcgattaagcgcacaaaaaaatacaccattcggtcaacctgcacttccccacgctggtattatccagatcgggtcataagggatcaaagcgcgtttcttccgcgctttatctcagccaaaacagcacccctagtgctttccgtatacaattttttattttgacatcataatagatgataagaatcattttgtaaacaacgaaatcatttttttcatatagggacgggagaggatgatcaaatttggaaaaaggacacatattaattgtggaagatgaagaaaaaatcgccagggttcttcagcttgaattggaatatgaaggatacagtgtcaccatcaaacacaatggcacagaaggtctggatgcggcagcgaaaggcgggcattccttggtacttcttgatgtcatgctgccggggcttagcggactggaagtgctgcgccgcttgagaaaaacggattcgcagacaccggtcatattattaacggcgcgagacagtattcctgataaggtaacaggtctggacatcggtgcaaatgactatgtcaccaagccgtttgaaatcgaggaattgcttgcgagaatcagggcggcgctgcgactaaatggaacaaaaacggaagatatcggcacctttcttacatatgacgatttacgggtgaacgaaaaaacccgtgaagtgagacgcggagacaaagaggtggaattaacgccgcgggaatttgatttactcgtctatatgctaaagcatccgcagcaagtgctaacacgggagcaaattctaagctcggtatggggatttgattatatcggtgatacaaatgtcgtggacgtctacataagatacatcagaaaaaaactggactatccttacgaaaaacagctgatccatacgattcgcggggtcggctatgccattaaggggtaaacgatgaagctgaagacaaagattcatctatacacatcaatatcactgttgattttattaattttggttcataccgcagtctatctcattttttcgtccgcgctgacatcaaaggatgcggcccggcttgctgatgagacggataacatggccgaagcgctgcgtgcggctgaaacagaaggagtggctttgcaggatatgctgcaggcctatcttccggcaaatggcatggtgcgtgtagtgaatggtgatcaaaaagccgttatgacgatcacaaaagaaaaagcctataaagattttcctctctcttttcatagcggagaaaaggcagatgtgaggaaacatgacggcaagctgtttgccgaggctgctgttccggtgatttggaccgatggacaagtggtgtctcttcagctggttgaaaggcttgagaacacagaagagagtctgtttctgttgaaaatcatcttaatcgctgcaagtgctgctgtctgcattgcttctttttttgcaggcagcttgctactagcccgccgaatcatcaatccgatcagacgattaatgatcacaatgaaagacatacagcgagacaaagaatttaaaacgatttctttagaaggacagtccaacgatgaattgtatcaaatggggctgacatttaatgaaatggcaatgatgctgaaggagcactatgataaacagcagcaatttgttcaagatgcttcacacgaattgaaaacgccgctcaccattatagaaagctacagcagcctgatgaagcggtggggggcaaaaaagccggaggtgcttgaggagtcgatagaagccattcactcagaagcggtgcatatgaaaaaactgaccaatcagcttttggcgttggccaaaagccatcaaggactcgaggttgatctgaaaacaatcgatctgattaaagcggcgcgcgcggttatgcaaacgctccagtccgtttatcagcgtgacatattgcttgaaacagataaagagagcctgcttgtaaaggctgatgaagaacgcatcaagcagctgttgaccattttgcttgataatgcaataaagtatagtgaaaagcctattgagatgtcagctggaacgaggaatggacggccatttttatcagtgagggatgaaggcatcggaatacctgaggagcatatcccgcatttgttcgaacggttctaccgggcagatgaagcacgaaacagaaaaacaggcggaacgggtttaggcctttccattgccaagcaaatcgccgatgagcatggcattgagctgtctgtcaaaagcaagccgggacaaggaacagctgtcaccatgcaattcagcgaacagaatgggggaggccgatgactaaaacaataaaaacagtatcttttgccgcagcagccattttagttgtcatcatctgtacgtttctcatcattcggcaaacccatgagaacgtattgtcaaaggagactgtcgtaaaaaaaatcgaatcctcttatgaaggcaaggtcacgaaagcaacacaatcaaaggataaaaaaacatatgatataacgcttgaaaatcaaaagggaacttactttgtaaaagcagacgcaatatcggctgacattctttcaatgaatagagtaaaagcagtgaatccatctgccatgacagaaaaagaagccgagcatctcgcgcttgagcgggtgccgggaacggtcaaaaaacaaacacgacaaagtcgagttgccacttataccatacaaaaagaagatgggaaaacatacgaagtgaaggtagacatgcaggcaaaaacagtcttgtctgccgatcaaatcagcagcaaagatcaacaaaaaacgccgattacgaaaaaagaagccaaaacaattgctgagcgagaaacgggaggaacagcggatgacgcagatctcgaagaaagtgagggcactctcatctttgaagtggacgttgatcttcctgataataaggaagcgacagtgaaaatcaatgcctacacaggaaaggtagctaacattgtgtatgaagactgacggtttctcatcaaattctcatcttgctctcgttttcctttcatgttgagtgtgtaaactgtactcatacaaaacaaaggaggactcacaaatgctcaagaaaaaatggatggtcggtcttttagcagggtgcctagcggccggaggattcagctacaacgcgtttgccaaagaaaacaatgaaaacagacaggcttcttctaagacggatgcactcactgaacaagaagcagaagcaattgctaaaacagttgttgacggcacagtagaagacattgacagagacctttacaacggcaaagaagtctatgaagtggagattgaaaaagaaggtgaagactacgacgtttatgtagatattcgtacaaaacaagcgcttaatgacccgctaaaggagaaagcagaacaagtcgccataaccaaagaagaagctgaagaaattgctttaaagcaaacaagcggaaccgtaacagaaagtaagcttgacgaagatgacggtgcttacatctatgaaatggaaatccaaacgaagcaaggaactgagacagaatttgaaatttccgcaaaagatggacgcattatcaaacaggagatagatgactaatcaaaacccccgctgcagcgggggtttttcatgataagaaaccttcttttggacaatctaagtagaaaaggaggcgaaacgcatggaaaagaaagaggagcaatacatcaatcaggctgaatatgtccctcatccgacgaaggaaggagagtacgccttatttcttcatgaaacgtatcatttgctttctgaagatgacgagacacaaacaacagaataagggcttaggcccttgttttgttccgtaattgtgatgtaagcgcatttattacttttttgagttgacacagcttgtttttttctgtaatctcagtgtgtcaattcaattaggaacttcgttaggtgaggctcctgtatggagatacgctgctgcccaaaaatgtccaaagacgccaatgggtcaacagaaatcatcgacataaggtgatttttaatgcagctggatgcttgtcctatgccatacagtgctaaagctctacgattgaaggcgcccgcacgctttttttgccgtgcttctttcaccttcaatcccgaaggctttttttatgcctttaaaacgaaaccaatcaaaggaggtgcggagtatggattctccccattcgagtcaatctgaagaagtacccatatactatgacagcaagacaattgattacacgatgaggagacgaactgccgcaccttctggcgaggccggcacgtctccgtagaggaggtacgagtcccgatggttcaaaacatgacctatgacgaactcattttacgcatcattattttactgcgagacgggaaaatcagggatttcagaagtgttattgatgagcttcagccctatgacatggcatttatttttaaagaaatgccggaaaaacaccgcgcccgctatttatcttatttaactgtagacgatatcactgatatgatcggggagctggaacgcgaatttcagcttgtcgtcttaaataaagtcggaaaaacaaaagcaacactggcgatgaacaaaatggacaacgatgacctcgctcaattgcttgaagaaatggacgaagaactgaaggaacagcttttatccagcatggaagcgtcagagtcaaaagctgtacagctcttaatgaattacccggctgattcagcgggacgcatgatgacaaaccggtatgtgtggattcctcagcattacacggtaaaagacgcggtcgtcaaactgaaaagcttcgctgaaatagctgaatcgatcaactacttatatgttattaatgaaagcaaacagctggttggggttctttcctaccgcgatttgattctgggtgaacctgaagaaaaggtgcaggatttaatgtttacccgcgtcatatcagcagatgctcttcaggaccaggaagaagttgcccgcctgatagaacgttacgattttttggcaataccggttgtagaagaaaacaacgtgcttgtcggcattgtgacggtcgatgatattatcgacgttgttattcgggaagctgatgaggattacgaaaaatttgccgcttccggtaaagacatcacctttgacacaaaagcttacgtggcggcataccggcgcctgccatggctgattttactcttgtttatcggactgatttcaggaagcattatcagctattttgaagacgcgctgaagcaggttgtcgcgcttgcgtttttcatgccgatggtgtcagggatgacaggaaatacgggaacacaatctctcgcggttgttatcagaggtttgtctaaagaagaaatgaacaaaaaaacgattgtgcgcctgatcttccgggagttcagaacaagtatttttatcggagcggtttgttctgtgctgattgcgattgtctccatcatatggcaggggaatgcgcttttgggatttgttgtcgcctcttcactgttcttaaccttaatcatcggcacgatgtcaggaacgattatccctattattttgcacaaactgaaagtagacccggcgattgcttctggaccgctgattacaacgttaaacgatattttatctttattaatctactttggcattgccactgcattcattcactcattataaacgtaaaaagtccgtctcaactgagagccggacttttattatttaacggtttttgtaccgaaagtgagcattaagctgcccctccagcatttttttccgcacttgcggatcgttttttaacatctgttcttttttgcgcatatcctttaaaatctctgccgtctgtacgccgtcttcacgtttattggcgatatccatcagccgctctacatcagcaaaggagtattttcttgtcccccttgaagaacgctgcgggtaaatgagctttcgttcctcataatacctgatctgtcttacggacaatcctgtcaattcactcacaattccgattgaaatcacttttttgtctttataagaatgatcttctgtggtcatttttccacccctggatgtcttttgataatagtatataaaaaacaaagagaaaaaacctaacgcttgtcatattttctaacatcaaatagaagatttttgaaaaaatacggaagaaaaattaacaagaataatgcgtaacacccaagcacgttttatcctttatgtaacgaatcaaacaaggaggaaggataatcatggaggaagaaaaagcggtctcactggcaaaagaaattatagagttggatatcaagcgtgatgaaatgctggagacgtttatgcagcttgccggagaacaggcttttcaattattaagatcggttcaaaacggacaataccgaaaatcttcgtaaacataaattctttacattagattcataccacgttcatttaaaaagagtatcttttgtataggatacctcaaaatgaaggaggacgctatgagtaatttattgaaatccgctttagaaaaagaacgacgccattattctgaaaaactctatcagattggggtttataataaagaggtcatgaacaaaatgacgatttctgagcttcggaaagaatacgcttatttctttcgaagcattacaaatcataaaaattatccttatacaagataatgtataaggatttttttgcttttagaaggaatttctcgaattatagcgaatacgtatagtaagggactgaactcttattatatgtaagggttttcattatttttttataaaaatcctatatacgaggtagatatgatgagattatcgtttaacgaagaagaagttgagcgtgcgatgaatttgtacagagtttttgcaagggctttcaaaagtgtgtccgaacatagtatccgtgatagcaaagagcacggttttaatcccactgaatttgctgtactggaactcctgtacacaagaggcccgcaaaaattacagcaaattgggtcgagacttctgcttgtaagcggaaacgtcacatatgttattgacaaactagaaagaaacgggtttttagtaagggagcaggacccgaaagataaacgctctgtttacgcacatttaactgacaagggaaatgagtatttggataaaatttatccgattcatgcactgcgtattgcgagagcgttttcaggcctttcgcctgatgaacaggaccagctgatcgtcctgctcaagaaagcaggcatacacagccagcatttgctgtttcgttaactattctacactctctgtttcaggagagtgtttttttgtttcataagattctttttaaaacatcttcaatcttcctatcagacatttcgccaaggtatccattgacgtgttttttatactccttcatctgttcgttcgattgaaaaaatgccgcgatatactcttctgctttcttcatgtcccagtttctcatatctgtgacgagtttcctttcatgtagaaggtttaaattcatttcctcctgtcccggcagtgcatgataaataaataccggaagccgtttctgtaagcattcactgatggtcacgcctccgggtttagtcatgatgcctgtcgcctgttcgtacaaacggttcatctctgctttgctgtgaaggtaagaaatcgcctcgatcaaggggtggtgtaaacttttgacataggagtagagcttttcgtttctgccgcataatattttgtataagatctttccgcctggcgacagttcctgcacccattttaaaatcccaccgacccccatactgccccctgtgatgatgatggtatatggcgggtggtgctgcaaggtatctgctgattccattgcaaaatttcggtgaactggaatgccggtcaagtatatgttgttctgatcgatcccctctgatattagctgcttctttacttccgtgctcggaacaaaatggtaatcaatgttcttccgtccccataattgatttacgaaaaaatcagtgtatacattcacaaccgtcagattcggatattcaggctttaatcggttcagcagataagaaggcagcgcatgtgtgcagaaggcgatatcaggctgtttttcttggaggatgtgcctcatttgctgtgtgaacagccattcgtacatgaaatagcgtttgtcatgctggaattctccgcaggcgaggagcctgtaaatgccgctgtacgttttcgggaaatattgaatccattttaaataagccacggaggacaatttttctaaccggctatacgcatgtgaaaagatatcaatcttttcagctgccagcccttgagactctaattcagcctgcaatgcatcagccacatgatgatggccggtggaaatgcttaaaaaaggaaaaatgagaatgtttttcatgacagtcctcctaaaaaaatatggcaactatattttgaggagaacgttcacaaaatataagggtgtttttgatcataaggaaggtgaaaagatgaaaacttgtttcctttccatatggagagtggttgacccgatttatttctttttttcaaggctaagcttgattgacaacgatcaaaaaagcgtttttcgagtcaggctgacgaagtataaaggacatcatgtcgtgcttagcgatggaacgcatattagaaaaaatgatgtgctcgttaaaattcatctgcataacataaagctgatcagggagcttcaaagcattgagagcgcagtcagaaagggaatcattatttatcagaaagtatatcaatcgatgccgcttcttcttgactatatcaacaatcataaaaaaagcgagaaaatcaaaggaatcattgggattacaatgcttgacaaaggtgtggaaaggctcggctttgatgtgatcaccccggtgaatcctttttacagatgctttaaaaaagtgtcccatgtgccgattttatatttgacttcaaagcctgtgagcttgcggcatttaccgaattcatcctatttgtttatctcaaaagaaaagctgcagaaaacctatcaaaaaaaagactgatgcctcggtcagcacagtcttttttgattaaatctgatgaaatgtcacttcagggcggcttccaacacggatatttacgccggtttgtcccaagccctcgctgatataaaatggtttatcgtgatgataatgaaggcctttaatcatgttcattcgcacgagcttgcccattttcaccaaatgatacggttttggccagtgaatttgcccgccgtgaaaatgccctgacagcaggtaatcataatgaacatctttcatatccagaataatatttgggtcatgtgttaagacaagatgatagccattttccagactttgataagagccggtgatattactccgattcgtactgtaatcatcaatgccgataatattgactggccctgcagccgtctcgattcgaacatgttcattttgcagcgtgatacagccgttttcctctaaaactcgcttcaatctctgaaagtcctcttcttttaatacataatcgtggttaccgaacaccgcgtacattccatatgcaggcttcagcttttgcaaggcgttcaagtaacctgccagcttcggaatattacgtttccgatcaagaaaatccccggtaagagcaatgatgtccacaggctgatcttttgttaaatgatacagctcctcaggtgagacagaaatgttttccaagtgaagatctgataaatgaaggatatttaatttttttctggctggaaggccgtctttttggtcgattgaaatggtgttgactttcacatcttttgtattgcggttcgctttatatagaaatggcacaaatacgagtatggccaatgaaagtaagattgtaaacaaaatatatcccctcccttctatcagtatagtaagtgatcaagccctatggatagcgggaattaatgggtagagacaggttgaaaaacggattgtcatatgatgaatgatttggaagggaaaagggataataaattttgacacatgaggcagaacatgccgacggagtcagaataacaaatggatgtgtaagcaatgttacgattgatgagacaacaaaaaaaagaaacatattatctctggatcgcattatttcttcttttattgtatgtatccccgctttttattttaaaggaagatgcccatatccgggtccacgataatttagattccaacatcgcttggtacaaggttctggccgatagcggagaaatcgtcggcaaggttgacgctgccattccgcaaatcattaacgggctgccccgggatgcctttggcaccgagtggagcggaattgtttggctccatgctttcttttcttccatgaccgcctatgcaataagccagacggttacaagagttgtcgctttttttggaatgtatgtgctgctgaagaaacatataatcccggaaccaaaagcggctttcatccgaattggcgtatcgcttgcatttgccttaacaccgttctggccttcgggaatgctgagtacgcttgggtaccctttggcactgtgggcttttttaaatatccgaaaaggggatatctcatggagagagtggctgacgctgggcttgctccctctatactcaagctttgttctaggtttcttctttttcctggcagggatggcgtgtttttggctgtatgatgccattacaaaaagaagatggaatttgatgttcttaggcagtattgcatttatgacgagtatctatcttttcgttgaatatcggcttgtctattcgatgctgtttgagcacgcaccgatgcatcgtatcgaatttatctcatccaggcatgacgtttggcattctcttcggctatccgtaaaaaactttgtctatggccataatcatgtgatgaccgttcataccgttgtcatccttccgatcctgctggtcgtatttgctgctctgctgttcaaacgaaatcggacaaagccagaaaatgtgtatctgtttttatgtgtgcttaattacggattgtcattatggtatgcgttttggttcaacaaaatttgggctgttccaaagcagaaatttgcctttttagcagaatttaattttgcccgttttcattttcttcggccgcttgttatatacgtgagctttgcgcttgctttatatctcatttggcggatggggaaaggatggaaatggcttgtgtacgccgcagtcgctgcacagctgatggtgttggcgccttttaatgaagaatatacgtatggcgttcattacaacgcgccgacattcaaggagttttatgcatcggagcaattcaaagagattaaggaatatatcggacgtccgcaggattcgtacagggtggcgagcatcggactgcatccgtctattgcccaatataacgggttttatacgttagatacgtataacaatctgtatccgctttcatataaatatgaatttaggaaaatcatcgaaaaagagctggaaaaaaattctcggctgaaacaatactttgatgaatggggcagccgctgctacctttttgtcgatgaactcggtaaacgatatgatttcaaaaagaactcgaagaaaacgatcaacaaccttcaattaaatacagatgtatttaaaaaaatgggcggacggtacattttttcttctgttccgatcatgaatgctgaacaaaaccatctcgcgctcgtaaagacgtttgaccataaagattccgcctggcgcatttatttatatgaaacaagataaggaggatatcgattgaaacagtcacagccagtattaaccatcgtcgtcccgtgtttcaatgaagaggaagtgtttcaagaaacaagccgtcagctgacagaggttgtagatgatttaattgaagaaaaattaattgctgaagacagtaaaattctgtttgtcgatgatggcagcaaagaccgcacttgggctttgattgctatggagagcataagaaacaagaaggttaccggcttaaaattagcctgcaatgtcggccaccaaaaagcgcttttagccggactgcataaagcgaagaataggtcagactgcgtcatttcaatcgatgctgatcttcaggacgacatctctgtgatccgggattttatgctgaaatatcatgagggctgcgagatcgtttacggtgtacgccggagcagaaaaaccgatacctttttcaagcgcacgaccgcgttagggttttatcgtctcatgaataagcttgggattaaattaatttataatcatgctgattttcgtttaatgaataaaaggtccctcgaagagcttgagcgttatccggaagcgaatctgtttttaagaggtattgtccccatgatcggctttaaatcggccgaagttttgtatgaccgcaaggaacgctttgccggcaaaacgaaatatccgctgaaaaagatgctatccttcgcttttaacgggattacttcattcagtgtcgcaccaattcgattctttacgcttttagggtttgttttgtttttcctcagcgctgtggcagggattggcgcgtttattcaaaagctgctcggccatacgaatgcaggctgggcgtctcttatcatatccatttggtttttgggcgggctgcaattgatgggaattggaatcatcggagagtatattggaacaattttttctgaagtgaaaagacggccgaaatacgcgatcgatattgatttgtataatgaacagctgagcccgcttcagcgccaggaaaaagagcggttagaaaaaaagtacagttaaacacggaaagagctgacttcattagtcagctctttttcttcaactgatgcaatatagcgctaagcggttcgtcttgcgggttgcggtaaaaatcaaaaaatgggcagccctgcttcttaattcgatcgatgaccgtatcaattgtaaaaagagcgggtgttaaagatgattgcacctcatgccagtagagcggggctgcaacagtcccaagctcatttcctctcgtcgaatagggacagataatcgtttttccttctgcatgctgcaaataatcaagatacaatttgccgtgtctgtttttaatcaagcgttcagtggtaaagagctcgggaaatgcattggtgcagtactctgcgatcagctgcgtaaattggcgtgtttcttcatacgtaaatgcctcgggagacaagggaatataaagctggattcctttgttgccggacagcttcgggtacgatgtgatgccaaaggaatccaacagccgcttcagttcatttgcggcctgcacggccataagaaagtcatctcgcgaaggcgggtctaaatcaatgacaatctcagccggacgcctgcttttaatggtttgaaaaggaacgtgaaactccaaagcaagctggttgcaaagccatagcaatgtagacatatcctcacagacaatatgttcatggcttccatcatagaaggactgaacaaaatccggcgcatagtccggcttgtttttttggaaaaatgattcgctcctagatccatgcggatagcggatgacggtgacagcccggtttttcagaaatgggagcaggtagtcactgacttcaatcatatactgaataaaatcttcttttgtttttttattcttttcaaatatgattttatccaggcttgtgaactggagttttgggtgaaccggtttggagtgtcgtatgacttgcgcatacgtgcattcggtccagtccatttggaattcgaaaccgataaacgatacctctcttaatgtgccatggagaattgttaagtattgaacagctgcacaaatcgaaggttcaagcttaaactcgcctgagggtgtttgatgtccgtgctgttccataatctcgcgtatagcgcttttttcctcatcgcgcattccgtgcgagacagaggcaatcggtgtcattattccgttttttaacaccgataccgtcagaaacccgttgttagggttgaaccctgttatgcaaacataagcttgtttaaagtttttatatttgagccaatcggacgaccgcttcttttcaagccatttgctgtttgttttcttcgctacaattccttctccgtcatattttattaccatctcccagagttgatcaaaatgatcataacagggaatggattgaatggtttcttttgcgtaaggatctggagatgcaggaagctttgctgcggatatgagttcacgcagcgattttttgcggtccaaatacgaaagaagcgttacatcttctccgcttcgctctaacaaatcaaaggcgagaaagcagcacgaccgcgcgtttgccgattcctgaatcttgtctggccttttcaaacgcccccgcacttgaaggtgttcaaaatctgcacgacagggattcaccaaacatacgatttcaccgtcaagtgtcagcggaagctctttttctaggtgctgaaaggcagttttggcgaattgtatgatttcagggaaggtgctgctgagctccacaccatttctgctggttaaggtcacacctgaagaatggatgcggagaatacagcggtacccatcatattttacttcgtaacgccattctgctccgattggcggtgacgaagttaagaccggctgcatggtaaacgccatgcgctatgatgtgccggaggctttttttctagttgttttttgttttttatctccggctcctttcggttcagcggcttgtgcaggtgcggcagccggtgtctcccggttcggccttctggttctgtcgatgctggcttgcagagcgcttaccaggtcaatgacatcttcacgaggtggcgctttatcaggagtgacagccgtttctttattttctagcttgtcgttgactctttgcagcagcgcctgtcggtacgtgtcttcatatttctcaggctcaaacttagcagtcagttcatctattaatgtgatagcagtttgcagttccttatcgtttacattcgattgatcatgtacacctgggacttgagcggcgcttctgacctcatcgggataatggatagactccatgacgatacaattttcataaacgcggagaatcgccagctgctgctttgacctgattgtcatattggcgataccgatctttccggttgagcgcagcgcctcacgcagcagggtataggccttcgtcccattatccccggggccgacaaagtaggagcggttaaaataaatcggatcaatttcctgaagctgaacaaagtcaacaatctcaactgctttctcctcatgctcctgttttaagctttttaaatcttcgtctgtcagcactacatattttccttttacatattcatatcccttcacaatttcatcaggactaagagttttttcgcaatttgtgcaaactttctcgtatttgattggtgcgtgatcctctttatggaggctgcgcagtttaatatctttatcttctgtggccgcatatagcttgatggggatgtttactaatccgaagctgatcgatcccttccacattgtatgcatatcgataaacccctttttttctttagtgtgaagagaaggagtacgattcatgtgtagtaacttatgggtgaaaaaaagccggcgctgttattgcgacggctgttcaataatgaattgttcgaattgttccggaggtattggcctgctgaaaaagaagccctgcaaatggtcgcagcctttttcaaaaagaagctgcttttgagctgcattttccacaccttcggcaatcacctgcaaagacagctgatgccccatggcaataatagctccggtaatttgctctgatttaggatgggtctgaatatcgtcaataaatgatttgtcaatcttcagcctgtgaatcgggaagtccttcaaatagctaagagagctgtgaccagtaccgaaatcgtcaatactgattctgattcctaattctgttagggatgacaaaacctttttggagtgatcgagattgtccattgtcatgctttccgtcacctccacttcaagaagctgcggaggaagctggtatttattaagcgtatccttgatgaggggaatcagatctttagattgaaactgtctggcggaaatattaatggcgacagaaagatcatagcctttgtcatgccaaatccttgcctgcttgcatgcttcatctataatccactttccgatatcaataataagtcccgtttcttctgcaacaccgatgaattctccgggcggacgcagttgcccgtctggtgtcacaaggcgtatcagtgcttctgctcctgtcattttttgttttttcacactgaattgcggctgataatgcaagacaaatctatcgttttcgattgcttctctgagtaccatctcttggttaagcttaacggtttctttgttgccgattgaaaaagaatagtatctgtatttgcttttgtttcgttctttagccgcatacatcgccatatcagcctttttcatcaattcaaggccatccgtcccgtcttttggagatatcgcaatcccgatactgacagatgtgacaagggtgtgatcttgaattttgaaaggttttttgaatttttggataatttttcttgctaaaacatctgcttcgcctgttcctgtattggcgtctgttaatataataataaattcatcaccgccaagacgggcgataaatccgttatcagggactacagatgacaggcgtttagctgcaaactgaagcaattgatcaccgacattatgccctaatgcatcgttaatcactttaaaccggtttaagtcaagaaagaatacaacagtgttataatgcaaggaatgctcgcgattcagcacctttgttagatgagagatggcatgccttctgttaggtaagtctgtaagcgaatcataatgagccattctatggatttctttttctgctttgtactgcttcgtcatgtctttacaaatgacataaatgctgtctagttcctgattgacctcaacaggtataagcgtaatatttaagtgaaactggcctttttcagtgataagatcgctatcgctgttcatcgcttgtttatcttttttaacttgctcaaaaaggcgcttaaccttcagtgatgtgtaattcctccagtcatgcatgctgaagccaaatttgctgatcatttcctcaccagcgtgattggaagatattatgtctccttctaatgataaaataaaaattgcatcaatattgtggacgattaaagactgaaatcgctgttcgttatcctttatgcgttcgctctgtttaataaactttcgatctgcatgggaactgaataacaataacgtttggatacaaaaaataattaaagtaacaaaaattgaccaatgaaacgtttgcacctccatatggcttccgggcggagccatgtccttatggaaagttgccgcaagcatccctgtgtagtgcatgcccgaaatcccaatgcccattacaattgaactgacgactttatagaatataagatgctcagaatgtttttttacggccaagtcaaagaatatttttaacgagacgaaagaggctgcaatcgcaatgataattgaaactgtaaataaaatcggttcgtaaataatcattacccgggaaatggcagacattccgatatagtgcatagaagcaatagatgcgccaagcacaactgatccggtaagcagtctgtaatatgtaagaatgtgccggctgacaaaatataatgacacaaatgatcccgaaacagatgcgccaatggctgccattaaaggcatgaattcatattccatcggcatttccatatggacggccatcatccctacaaaatgcattgaccaaataccgaatcccataataagtgagccgccgatcagccaaattttactttttaagcctgtattgatggtgactttccttgaaagttcaagggaaatatacgaggcggtacaggcaattagaatagataaacatatgagagtcgtattatatgtaacgtgtatttccaaatggagattccccccgtatcgtgtgttccagtcttgttgactctctttattatcggctgcttaaccgcagagtttcagccttcaaaacgatagaaatacgagggagatctatttttagttcaactgaccgtgaaaaatgtgttaaaatcatcttgacgttttccgaaaaaacaaaaatgtataatacataaacatgaaacaagggagttggtggctatcgaagagctggttatgtcatggatagaagcatttaaaagcttatcttattttggaatatttctagcgctcagtattgagtttatcccggccgaagtcgtcttgccgcttgcgggctattgggtatctaaaggcgatatgacacttgccggcgttgttttggcaggatcgcttggaggagtggccggtccgcttacgctgtattggataggccggtacggaggaaggccgtttcttgaacgttttgggaagtatctctttattaaacctgaagcgcttgataagtcagataaatttttcaaaaaacatggtggctttgtcgcgttcagcggccgtttcttgcctggcatcaggacattgatttccataccgtgcggaattgcaaaaatgaatgtttgggtgttttcgctttatacattcattgctatgcttccgattacatttgtatatgtttatctcggtgtgaagctcggtgaaaattggaaggaagtcggctctattcttgatcaatatatgcttccgatcgggatagccattttggcgcttttcctgctctacttactgatgaaaaagaggaagaaacgcacgcactccgaacaattatctgtatttttgaaaaataaacgttgacaaatcattgcgctgcgcatatcattgacgtataaaatcatatttcttgaaatcccaaaggggagtagcgtccggaatgtattccggaaacaaagtcgtcatttcatggattgtatccatcggctttgttggcatgcctgaattcatgtctagcaagacctttgccttatgtcggcaaaggtcttttttgcatggtccggccggcataagatcggatgaagagaaagaaaacaacttttttgggagggtatcatttatggatgcagcattattattagagtatggttgggttcttctcgtcttgatcgggctggaagggattttagccgccgataacgcgctggttatggcggtaatggtaaaacatttgccggaggaaaaaagaaaaaaagcgttattttatggattggcaggggcttttgttctgcgatttggctctttatttgcaatttctttcttggtcaacgtatggcaggttcaagcgattggcgcgatctatttgctgtatatctcagcaagccacttattgaaaagatatgtatttaagaaagaagacacacataaagagacgaagcaaagcggtttttggccgactgttttaaaagttgagctggcagatatcgcgtttgctgttgattccatcttagcagcagtagcgctggcggttacacttcctgggacatcactcccgaagatcggcggacttgacggaggacaatttctcgtcattttggccggcggtatcatcggactggtgatcatgcggtttgcggcttccatgtttgtgaagttattaaaggaacgtccaagcctagaaacagcagcctttgtgattgtcggctgggtcggagtgaagcttgctttatatacgcttgcccatcgcgacatagcggttgtttctgagcactttattcattctggaacatggaagctgatattctggggtgtcttagcagcaatcgcggtttgcggctggtttatgtcaggtgggaaaaaacagccggagggcgcacaaaacgaacaaagaaacagcacccgtgaacgggcgtaatctgaaagactctgcttaaaagcagagtctttttgtgtttgaagcgttttcataagcgaaataaaataacatttttataacatctttgttacaaaaaacacgcataaaacccccttaattctttagaaaggcacgaaatcatgtataggacgtcagaatggtttgtcataattgagacattggaaatcaatatttctttttctcctttgcgaatccctatcaaattagctatcattaatgagtagttatagggaggaactgaggtgaaaccagtgcttagccttttgtttaaattgggaaaaaagaagcaaacacttgaaaaagctgttgagagtatacaaaaaggcaataaagatctgcaaaatgaattaatacagcaatataagccatttatcgcaaagacggtttcatccgtttgtaaacgatatatagatgaaaaagacgatgagttcagtattggactgatcgcgtttaatgaagctatagaaaaatattcacctgaaaaaggaaattctctgctcgcatttgctgagcttattataaaaagaaaagtcattgattacattagaaaagaagccagaagcgcacaaaatataaatatcgatttacaggaaggagacgatcaggagtcatcacaaagcctgattgaagccgagctttccattgatgaataccgccgtcagattgaacaggagcagaggcgggaggaaatcctctattttcaaaagcagctcaaggattatggtttatcgtttaaagaactgcttgaaaattctccaaagcacacggatgcaaggcaaaacgccataaaggtggcaatgacgcttgttgaacatgaagaattggccgctatcctgtatacaaagaagcagcttccggtcaaacagcttgaacagcttgtctctgtaagccgaaaaacgattgagagaaacagaaaatatattattgcgatgtgtattatcattacgggtgattatatttatttaaaagattatcttaaaggggtgctgcactcatgagaagagggattatagtagagaaaaataaaaaattcgtcacgttgctgacccctgacggacaatttttaaaagccaaaaatgatcgacacagctatgaaatcggagaagaaatcatgcttccgagtgaaacacgcatgggcagaagggccagcttttttgatttttttaaactgcgccctttcaaaatggggatttttacgatgactgctattatgctctttatttttatagttctccccgttttttctaataataaggcctatgcgtatatgacaatcgatatcaatccaagcgtcgaaatggcgttaaacagcgattatgaagtgattgaactgacgcctctaaacgatgagggacagaaagtcgtgaatgatatagatgattgggagaagactgattttaaaaaggtgattgacgatattataaccgactgcagtgaacacgggtatgtaaaaaaatcgaaagaaatattgatttccactgtttatgaaaacacagaagacaatacatataaaaaggctgtgaaaaaacagctgaatgatgtgactgaaaaatataaaacgacataccgcatggaatctctcgagtcagatatgcaaacgagggaaaaagcgaagaaagaaggcgtctcaacaggcagctacatcaaatcaaatgaaaagaatgacaataaagatataaaagatgactccagcaaaccatccggggaagaggatcaaaagagtgatgaaaatgaggatgaaaacaccgatcaaactgacacccaggacagcaagcaaggagataatgaacagctgaatgatgcggattccggagaccagaaagaagagaaagcggatgaccagattgatgatagtgacaaagataaaaaaataaaggaatcagatgaaaacacaaataccgaaaaagatggggaccatgagcaaaccccaatacaagatcctcaagataaaggaaatgaaaataacggcgttgacaagggccaaagccaatatcacagggactggaacaatggtgaacaaggcaagaaccgttcttcgtccagaagggataacgcttcagaccgacgtaatccaaacggctacagcagtgataatcattcagctaaaaatgaagattcgccgagtgcccccggcgaataaagacctgaatttatttagttgtgccatttaattgtgattgtgcttgctgtaccagccgctttgtcatttctccgcctacagagccgttagcgcgtgcgactgtatcagaaccaaggttcacaccgaattcttgagccacttcgagtttaaattggtcaagtgcctgctccacccctggaacaacgagtttatttctgctcgccatctttttcatctcctttttcgataaagaaattcttaacgcgtatttagtttgaaatatacggggtttatttatgctggcaattgttgtggagaaaaataaaaccccggcctctgagccggggtggcgcagactatagaatgtctgctgtcattttatgtgcggttgcctgaatatggaatgtcaaaatggagaggactgtaatggcgataatctgtctgattttaagccattggctgtcattcagttcttcaaaacggtgacggagacgctctgtctcctgttcggcgatctcctgcagatttgattctttcatagaaggagtatcttggtgatggatggcatcaagcacatatgcgcagctttcataataagcaatcgggctgatgacatcatcagatctgtctgagattgtgttaaaggccacttttaaaatagctcgtatgtgttcaaagtcataaatggattttaaatcacgtacaattaaaagaataactgcctgttcaattgagtattttttgcctagctcagggtgtccgatcagatctttgatatcacgctttacccagttttgaatcgcggttgactttaacgaagtcagctcgcataagttgccaagctctacgatttcatttgtagacagtccgtattcttttttctgtttttttcgttcatatcttgtaagaaattcaggaatttctagatgattggctgctttttctgctgacatgttcgctgattggacgagaatgtcgagcgggctatgttctccttgtccttttagggaatagagcagccgcaccatatcggttcgagagagtttaaaaatgttcattgttcacctctttaaacaatttgacgcggatataggtctatgtataagttcaaaattcaagcgtcagcaaattacattaacatcatacgtcgaattccttgcattttcaaatggatgttttataatttaaatatacgggttcttttgaacttaaaataacggaggttgttatggcgaaaagaatttttctgtttattctaacgaatattttggtgcttacaacaatcgggatcgttttgtctgttttaagctctgttacaggagtcgggacgtactttacagctgatggcggtatcgatccaatggcgcttcttgtgttcagtttagtcgttggatttgtcggttcctttacgtctcttgcgatatccagatggatggcaaagacgatgatgggcgtcagagtgctgaatccgaaaaaacactcgctcagctatgaggaacagcaattggttgatcgtgttcacagattaagccgctctgccggtttaacgaaaatgccggaagtcgggatttaccgttcacctgaagtaaacgcgtttgcgactggaccgtcaaaacgccgttcacttgtcgcagtatcgtcagggctgctggagcagatggatgacgcagcagttgaaggtgtgcttgcccacgaggtcgcgcatattacaaatggtgatatggtaacaatgacgcttttacaaggcatcgttaatacctttgtcttctttttatcgcgtatcgccgcttggatagcaagccgttttgtcaaagaagatctagcgccgatcgttcattttattgcaataattatttttcagattgtcttttcgatacttggcagcctggttgtgtttgcgtattcacgccatcgtgaattccatgctgacaggggaggagcggatcttgccggcaaggacaagatgattcatgcgctacggacgcttaaaagctattcttcccggattatggaagacgatcagacagctgtccaaacgttaaagattaatggcaagaagcgctcttcgcttttctctactcaccctgatttagatgagcgaatcaggcggctggaagctaaataatacaaacacattgttcctctgagagaattctcagaggttttttattttatccattgactaaaatcataaaaaaataagcaagttaagaaaatgtttcgtaaaagcctttaaaaatggacctaatatctttagaataattaccgtacttaaaaagagaggcagaaggattttacatgagattaaagtttggaaaattgatacaggccttgtcaccggcccagctgatcgcattatattattttcttgcagttactgtggccgttatattgctgagtttgccggcggcccataaaccgggggcggattggacgtttattgatgcgctttttacagctgtcagttcagtcagtgtaacagggctgacagttgttgatacagctgatacattcagcacaatagggatttttatattagcatttgttctgcaatttggcggaatcggaattatgacgctcggaacattcatttggctgatcatgggaaaacgtatcgggctgaaagaacggaagctgatcatggttgatcaaaaccaatcccagttttcaggaattgtcaatctgatgaagcaggtactgtttctgatcttgtggattgaattttttggcgggctgattctcggcacatatttcttaacctactatgactcctatcaggaagcttatttacacggattttttgccagtatcagtgcaacgacaaacggcggatttgatattaccggtaattcgatgattccatttcgccacgattactttgtgcagtttattacaatgcttttaattatatttggagcgattggatttcccgtgcttgttgaagtaaaggatttcctgttttcaaagcatcggcgttatccatttacgctttttacaaagatcacgacgattacgttcggctcacttgtcttgtttggagccattggcatctttgccctggaagcaaaccatgcgttcgcaggaaaatcatggcatgatattttgtttttgtccctgtttcaatcaacggcaacccgaagcgggggactggcaacaatcgatatcagccaattatcagattccacactcttttttatttgtgcgctgatgtttatcggagcgtcgccaagctcagtcgggggaggcatacggacaacgacttttgctttgaaccttcttgcgctgtttcattttgcccgcggcaataaggccgtaaaggtattcaaacgggagcttcaccctgctgacttgatgaagtcgcttgttgtcacgatgatggcgatcctgctcgtttttggcgcgacactcattctgaccattacagaaaaacattccctgctggagcttttgtttgaagtgtgctcggcattcggtacaaccggcctgtcgcttggaattacggcagatttgagcagtgttggaaaatgcgtcattatgattgtcatgtttatcgggcgaatcggcatcctaaccttcctgtatctgatcggaagaaaggaaattgaagcgaactatcactatccgaaagaaagagtgattatcggataggcaaaacaccgcatactttgcggtgttttttgattgccaaaaaaaagatgtgtgcctcctgttcagttggagaacctaacttcgacaggtgcaatttacgctcctgcatcttaaaatgtctgaaaactggcgaggaggattcgtatgaagcgtaaagctgaagtgaatgaagccattaaaaataacaatacacctaccgagagcatggaccccaattcatataagacacaatatcatgacgaccccaattttagaggggcaaaccgcaattccaaacagggccagcagggaggcatgtagttgtgaagaaaaaccgtcatagcagagacatgcaaaatcataaaaagcctatgaataaaaaggtgctggaggaagagttctcaagtgaacttggggattacaatgccgggaagatcatcgaaacgctggaagtcaccaagcctgaaaagaaaaaagaaaaaaacaaaaataaaaaacaaaaataaaaaagacctcttaggcggcgtccgcttaagaggtgctttttctattttaaataagcatttttgcccgttcctctgacaaattgcaataagctggtcatcctcagctcaatgaagggctgagcgactgtcttaacaaagttgctggagaggactgatgtcagggctgctgttaaaagcaagaggatcactaagctttgatagtcagtaagccaatcctcaagcccgacctgtcgtaatgtcttaataataaacccgtgaagcagatacacgtaaaatgtccgggttccccatttggtaaagaaataccgtttttgcggaacaagcgctaaaaagctgaaggttgccccaaaggcgagtacataccagccgattcgggatagtccgcttaccagggtaacgtctccaaatgaagaatacggttttgaaccaaacagaaaagaatagtcaaaatcgatgccccagcagatgacgaatactgcggcaagcactccgagcgcaatttgtttgccgcgttttgatctcaataaatcaaaatgatgtttatttaaataaaaaccgacaaggaacatcggtaagaatacgaatgtccgtgacaagctcagcgtgctgctgacaaagtccagataaccgatcagcacggcgattccgcagctgacaaacagcgcccactgctttgaaagctttgaaaaaggatataggagcaggttccaaaagaataagcttacaagaaaccataacgaccattgcggatcaatcgggttcacatttgccatgctttcatcttgcataatgtaataaaagacggaataaatgatttggaaaatcaaatacggaataatcagcttgaccgccagcttttttacatatcccgcccgtttaaagcctttcgcgaaataaccggatacaagaataaatgcaggcatatggaatgtgtaaatgaacttgtagaggtagagcataaaatgattatcattaataaaggaacgaaggatatgaccgaatacaacaaggaatatcaataaaaattttgcgttatcgaaataactgtcccgcgatttactcatagcatcaccttctctttcatcagtcactaagagattattccctgctggtacatattttaaaataaaagatgaaaaaggaatctaaaaaaatgctgattgttaggtcgatgtaaagtgatggtaaggatcgtagaaaatgtcttcgtaatgtaatggcgctgaaattttctgaaatttatagggcaaatgaaggaagttcccgcattttgtagaaatattgagggataggttttgaagaaggagtgtacatgcatggaaactcttggtgtccagacaaactcggagctgcgagaggaactgaatcgcctcaaagaagaaaacgcgcgactgaaaaaggaattgaatcagcatcaagtgattgtcaacaatacgctcgatgctatttttatttgtgataacgaaatgcggattgttcaggcaaatgaagcaacagaaaggatgcttcaagttgactcggaggatttgaaaaagcgttctgttttggattttttgttttcaatcccaaaggatgaactgaatctttccgtaaagaagttttttaaaaaaggctttctgtggaaggaggttccgatcaggcttgattgcggggcaacaaaatacatagagtttctggccaaaagaggtattggcgaggatttcttttttgttgtcatgagggacatatcttctaagaagattctggagcgggaattctctatgaatgaacagctttttaaggacttgtttgacagagcagttgacggaatcgtcctgtttgataaagatggcggttttattgatgccaatttgtccttttgtaaaagctttgaaatcaatcataatgagctgtctcatttatcgttgtatgagttcatagacagcggctcacgaaaagatttcgacaatatctggaaggcgctcaaccgcaagggaaaagcgaagggggagctgcctgtcaagcttcgttcaggagttcaaaaactatttgaattcacgattacatcaaacatcatcagcggtttttatatgtccattatgagggatatcacagagaagcggtctatggagctacagctctttaaaagtgaggagcgcttcagagaaatctttgaaaatgcaatggacgccatcatcatctggtcgaatgacggaagaatcgtaaaagcgaatcaatcagcctgtaaaatttttgagctgccgatgaatttgctgttgaaaagaaagctgtgtgattttctcgttgactcgcagcagaaatacagcataacgaagaggaaatacgcaaaatacggagagatcagagaagagctgctgtttcaaatggggaacggccaattcaaagagcttgaatttacttcaaaacggacaatccttgaaaatcagcatttgacgatcttaagaaatgtaagcgacagaaagcggatggaaaaggagcttcgggaaagcgagctgaaattcagaaaagtgttcaacggctcaatggacggcaatgtattgttcgacaatcaatacaggatcattgacgccaacccgttagcaagccatattttgggactgtcacatgaagagataaaacagcacagcttgttagatattatttctgcttatgaaatagaaaatctggcatcaccggcaaggcagattaattttgatgaaatggacaacgaaattccatttttgctgagcagcggtgataacagaaaactcgaattctcatttaaacggaatattattcaaaatatgaacttggctatctttaaagacgtaacagagcgaaaagaattggaggaacgcctgcgcaaatcagatacccttcatgttgtcggcgaactcgcagccggcattgctcatgaaatcagaaatccgatgactgctcttaaaggcttcattcagcttctgaaagggagtgtcgagggagactacgccctttacttcaacgtgatcacctcagaactaaagcgcatcgaatccatcatcaccgaattcttgattttagctaagccccaagccattatgtatgaggaaaaacatgttacccaaattatgagggacacgatagaccttctaaatgcgcaagccaatctcagcaatgtacaaatgcaacttgatttaattgacgacattcccccgatttactgtgaaccgaatcagctgaaacaggtttttatcaatatattaaaaaacgccatcgaagtgatgcctgacggcggaaatatttttgtaacgataagggcattggatcaagatcatgttcttatctccttaaaagacgagggaatcggaatgacagaagataaattaaagcgccttggtgaaccattttatacgacaaaggaacggggaactggacttgggcttatggtaagctataaaattattgaagaacatcaaggcgagattatggtagaaagtgaagaagggaagggcaccgtttttcatattacgcttcctgtcagacagaatgctgaagaaagaaggaatgatgaatgaactactatacgacagccgagacgccgctcggtgaacttatcattgccgaagaggaggaccggatcactcgtctatttctcagtcaggaagattgggtggattggaaagaaacggttcagaatactgagcacaaggaaacacctaatcttgcagaagcgaaacaacagcttcaagaatatttcgcaggcgaaaggaagacattctccctgccgctcagccaaaagggcactccttttcagcaaaaagtgtggcaggcgctggagaggattccatatggcgaatcccgaagctatgcggatattgccgctgcggtcggcagtccgaaagcggtgcgcgctgtcgggcaggctaataaacgtaacgacctgccgatttttgtcccgtgccacagagtgatcggcaaaaacagtgcgttaacaggatacgccggaagcaaaacggagatcaaagcatttttgctaaacatcgagcgaatctcctataaagaaaaataaaacatatggcacgttcccttttttcacggccgacatatcattttattaagttaaaaaagttggtctgatgaaaaaggaggacaaagcaattgaagccgagccgctctgagaaacttgccgtttttgccgaactgtttgtgaaactgcatatcttatcaagcgctcaaaaagatgaaatcatcaatgttaacaaaaagaaacaaaaaaaccgctgactcggctccaaatgagcaaagtccagcggttttttaatgcaccttttctcctctaaacagctgttcaatctcttcttcatagtttccggtcataatccctttttctgtgatgattcctgaaatgagatcatgaggtgtaatgtcgaaagcgggattaaagacaggcacattggatggagcggtccgaactccggaaatctgcctgacttcctcgggatcgcgttcctctatcgggatatcagcgccgcattcgacctttgtatcaaatgtagataaaggtgcggcgacaaaaaacggaatatcaaaggcgtttgctaaaatagcaagaccgtatgtgccgattttatttgccgtatcaccgttctttgcaattcggtcggctccgacaataacagcggaaatttgtttttccttcatcgtatgggcagccatgctgtctgtgattagagtgacatcaatgcccccctgcatcagctcccaagcagtaaggcgtgaaccttgcaggacaggccttgtttcacaggcataaatgtgtaatcccaaatctttttgtttggccaagtaaaacggagctagcgccgttccatagcggcttgtcgcgattgagccggcattgcagattgtcatgatcctgtcgccttttttgaaaagctgcagggcgttttggccgatcaaccggcacgtttcctcatcctcgacctgaatctgaatggcttcatggacaaggtttgtttttgcttcatttacggaaatcgcgttttcgaccgaatgactcagtctctcaagcgcccatgacaaattaatggcggtaggccgtgagctgtttaaatattgtttgatgtcttccagtctgcggcggaattccgtgacattatctgtttcaatgtttttggcagcaagcgccagtccgaaggcagccgtaatgccgatcgccggagcgccccttactttgagcgtgacaatcgcatcaaatacatcctctttcgtcgtcagctccaaatattccgtctcatcaggaagcttttgctgatttaaaatggtaatagctgtttctttccattcaacagaacgtggaacagcaaatgaatgggtcatgaatagatcattcctttacaagtaacttaaataattcaataacatctgttatcgttttgaattccgaacgtttttcgataaaggctgtgccggtttcgagcgccaagcgttttctgccgattcgtttatcaaacggcacgatcgtatccaggtcagctacatgggcaaggccgatcgtgcgtcgtatcagctcacagcccgcaaatccgattgcttcttcaaaaatatggctgagcgtatcagtgaggtaaccgtcgatgttggcgtaaacatccagactgtccttctgccaggattcactaaacgtctcttcaaacgtttcccagacctttttgacatgttcatataacggctctctgtcagccccgtcacggctgagtgcgttcaaaaataagttggcgataaattgccctacatcaaagccgatcggtccgtaaaaagcaaactcaggatcaatcacctttgtttcgtgctcacttgcgaaaatgcttcctgtatgcaaatcaccatgaatcaacgtttctgcagacgttaaaaatgactttttcagcttagcggcttcgattttaacgctgtcattattccaaagcttttcgacaaaaggacgaagctcttcttcaaaatcatttgtgtcatggtcgaagaaaggatctgtaaaaacaagtctttccgtaatgtcgcatagctctggatttgtaaactgtttaacaagctgttttttcaccttaggttcaagcgcgtaatctgatgagtagaaaagtgtttttcctaaaaattcaccgatgtgctgcgacagatgaggatagttttcacccttaatgagtccttttcttgcgatcttgaggtgagagagatcctccatgacggtaaccgccatttccgtatcagaataaaacactcttggaaccaggtgaggcacatgctcgccctgacggatgagagcgctgctttcgattcttgcacggtcgattgtcagcggccagctttctcccaccacttttgcatacggaaccgcctgtttaatgattaatgctctgtcatgttcttgatcataaatatgaaaaacgtaatttaagttgccgtctccgatctcctggcatgtcagcgtgcttttgcttggaaaaaggccaagcttcaccgccaacgccacagcggagctttcatttaacgtttcgtataaaggtgtttttgtgactcccatcatcataacctccaattatgtaatcacttaatatgtagccgtaaaaaagcctccttctcagagagaaggaggcttaacagtctatgtccgcctctcttatctctcagatcagatctgaatggaattagcaccgtgccttaagagaccagcgtctcggcgcgaaaaagatgcgccccatttcacaatggaattacggtcggttgctgttggggtcaaaaggccaaatccctcgcccaactctcgataagagaatatattcacttgtttgacaattctaatttatcagttgatgaacatggtaacaggtaatttagttagttgtcaatattttttaatataaatcttttctgatatcatcgaaaacaggaatgctctcccgaacttctgcgctttcttgaaggtcgatttccgctcggactatgccttcttcccggccgccttcagcaagtacacgtccccatggatcaataatcaggctatgtcctgcaaattcattatccggatttgaaccggtacaattgcaggctgcgacaaagcattggttttcaatggcccgcgcaataagcaggcttttccaatgatcaaggcggggaagaggccattccgcagaaataaacagcacgttggcgccttttgtcgtatgttttctgatccattccggaaaacggatatcgtaacagatcaatccagagcttttgacgccgtcaagctcaaagtatccgtcttcggaaccggctgataaatacagatgctcatccatcagctgaaaaagatgggcttttctgtactctttaatgatttgcccttccttatccgcaatgtacattgtattataaacatcagaattcttcctgacagcgaccgacccggcgacaatatgaacaccatgtttttttgccgttttcttcagccagctctgagcggagcgcccgtcttcgtcagcgagttcatcaagattggccagatcatatccggtcgtccataattcaggcagaacaagaacatcagcatgtttgctttctttttcgatgaaaaattcagccttttttatattttccgaaggtttgccgtatgaaatatcaaattgaagacaagatatcgtccatttcatctttttaacaccccaaatttttctttacttttttcatttaaccatatatgatgatggactatcatttcaagatttttttagaaggtgagaatagatgaaatttgaacagtctcatgtattgaaggaattgcctaaacaattcttcgcttctctggtgcagaaagtgaaccgaaagctcgcagaaggacatgacgttatcaatctaggacagggaaatccagatcagccgactcctgaacatattgtcgaggagatgaaacgagctgttgctgatcctgagaatcataaatattcgtcttttcgcggctcataccgtctgaagtcagcggctgctgcattttacaaaagagagtacggcattgatctggatccggaaaccgaagtcgctgtattattcggcggaaaagccggtcttgtcgagctcccgcaatgcttgttgaatcccggtgatacgatcttagttcccgatccgggttatccagattactggtcgggtgtcacacttgcaaaagcaaagatggaaatgatgccgctcgtaaaggacagggcgtttctccctgattacagcagcataaccgctgaagtaagggaacaggcgaaattgatgtatttgaattatccgaataatccgaccggagctgttgctacttctgagttctttgaagacaccgtgcgttttgcgactgaaaatggaatctgcgtcgttcacgattttgcttacggcgctgtaggatttgacggctgcaagcctttaagctttttgcagactgaaggtgcgaaggatatcggaattgaaatttacacgctgtcaaaaacgtataatatggcaggatggcgggttggctttgccgtcggaaacgcttcggtcattgaagcgatcaatctttatcaagaccatatgtttgtcagtcttttcagagcgactcaagaggctgcagcagaggcactgttagccgatcagacgtgtgtggcagagcaaaatgccagatatgagagcaggagaaacgcttggatcacggcatgccgggaaatcggctgggatgtaacagctcccgcaggttctttttttgcatggctacctgtgtctgaaggctatacttctgagcagttctcagatcttttgctggaaaaagcgaatgtggcggttgcggctggaaacggcttcggtaaatatggcgagggctacgtcagagtcggacttttaacaagtgaagaaagacttaaggaagccgcttatcgaattggcaaactgaacctgtttacccaaaaaagcattgacaagaccttataacgatgggataattcaaaataatttataaaatctatattttcttatcaagagcaggcagagggacgagcccgatgaagcccggcaaccgacttataaagcacggtgctaattcttgcagctagcggctgagagataagattcggacgagaaacgaaacctctttagacgcgattgcagtttgaagaggttttttgatatggatgaaaatgaaaggagctctggcatgagtgagttattagcgacatatctcctgaccgaaccgggagccgatacagagaagaaagcagaacaaatcgcaacaggattgacagtaggctcctggactgatctgccccttgtaaaacaggagcaaatgcaaaagcataaggggcgggtgataaaagttgaggagagagagggaactcctgcatcagcaaaacaagcggtcatcacaattgcctatcctgaaatcaatttttctcaggatattccggctttgctgacaacagtgtttggcaagctgtccctggacggaaaaatcaaattaatcgatcttcacttctctgaagcatttaagcgtgcactgccgggaccgaagtttggcgtatacggcatccgaaagctgctgggagagtttgagagaccgctgttaatgagcatatttaaaggcgtaatcggaagggacctgagtgatattaaagaacagctccggcagcaggcgcttggcggagttgacttgattaaagacgatgaaattttctttgagactggtctagcgccttttgaaacaagaattgcagaaggaaagcaaatattgaaagaaacgtatgaacaaaccggtcataaaacgctgtatgcggtgaatttgaccggacgtacggctgatctgaaagacaaagcgagacgcgccgccgagttgggagcggatgcgcttttgtttaatgtcttcgcttacggcttggacgttatgcaaggccttgcagaagatcctgaaatcccagttccgattatggcgcatccagcagtgagcggagcgtttacgtcttctccgttttgcggtttttctcacgctcttttactcggaaaattaaaccgatattgcggtgctgacttcagcctctttccgtctccatatggttcggttgcgcttccaagagcagacgcactggcgattcatgaagaatgtgtgagagaggatgcttttaaccaaacatttgcggttccgtcagcaggcattcatcccggcatggttccgctattaatgcgtgatttcggcatagaccacattattaacgccggaggaggcgtacatggacatccgaacggtgcccaaggcggggggcgagcgttcagagccattattgatgcggtcctagaggcccagccgattgatgaaaaagccgaacaatgcaaggatcttaagcttgcgctagataaatggggaaaggttgaagccgtatgacgactcgaaaaccttttattatttgtgattttgacggaaccatcacgatgaacgacaacattataaatatcatgaaaacatttgctcccccagagtgggtggcattaaaagacggcgtactttccaaaacgctgtcgatcaaggaaggtgtcgggcggatgttcggccttctgcccagccgtttaaaagaagagattacaagttttgtattggaagatgcaaaaattagggaaggctttcgggaatttgtagcatttatcaatgagcacgagattccgttttatgtcataagcggtggaatggacttttttgtatatcctttgcttgaaggcattgtggagaaagaccgcatttattgcaaccatgcttcatttgacaatgactatatccatattgactggcctcattcctgcaagggcacatgcagcaatcaatgcgggtgctgtaagccgtcggtcatccatgaactttctgaaccgaaccaatatatcatcatgatcggtgattcggttacagatgtggaggcagcaaagctgtctgacctatgctttgcaagggattatttattaaacgaatgccgggagcaaaacctcaatcatcttccgtatcaagatttttatgagatcagaaaggaaattgagaatgtaaaggaggtacaggaatggctgcaaaacaagaacgctggcgagagctcgctgaagtaaaacgggaattggcagagagagattggtttccggcgactagcggtaatctatcaattaaggttacagatgagcctttaacatttctcgtcactgcaagcggaaaagataaacgtaaagagacggttgaagattttctgctggtcgatcaaaacggagagcctgctgaaagcgggcattctctgaaaccgtcagcagaaacgcttttgcatacacatttgtacaataaaaccaatgccggatgctgcctgcatgtccatacggtaaacaataatgtgatttcagagttatacggagaccaaaagaaaatcacattcaaaggccaggaaattataaaagcactcggcttgtgggaagagaacgcagaagtgaccgttccgattatagaaaatccggcacatatcccgacgcttgcggcactgtttgtggaagagatttcagaagattcaggagctgttctgatccgaaatcatggtattacggcttgggggaaaacagcatttgaggcaaaaagagtgcttgaagcgtatgaatttttgttcagctaccatttgaaattgaaaacactccagcatcagctggttaaataaaaggaggaattgaaatggctacaattcgaattcatgatgaggcaaatacaacgattgaaaatcaagaggaagtggcaagctttctggacagtcaagaggttatttatgagcaatgggatatcacgaagcttccggaacatctctcagagaaatatgacctgacagaagaagaaaaacagcaaattcttgataccttcgaaactgaaattaaagatatctcaacccgccgcggctataaagcacaggatgttatttcattgtcagacagcaatccgaaacttgatgaactgcttgaaaactttaaaagagagcatcaccatacagacgatgaggttcgttttattgtaagcggacacggtatttttgtcattcaaggcaaggacggcacgttttttgatgtccgtttaaaccctggagatttaatctccgtgcctgagaatatccgccattacttcacgcttcaggaggaccgcaaagttgtcgcggtgagaatttttgtcacaactgaaggctgggttcctatttatgaaaaagacagcgtgaatcaataagcatgagatagccccgttcatcgaacggggctttttatatttattgcaaacgccacttttcatactgtgacagttcttttttaatcattgtccaaatcaaacctaaaacagctgcatcgtcaatgaatccaagaccgaggatgacgtctggaatgatatcgagcggcatgacgatatacaggattgcggcagttaacagcaaaagtgttttaacctgtgaacgagggtagtcgccatttcgccaatcgcgaagcatctgaaaaaaagtagtgatgtgctggatacatttttttcggtttttcctcttcaaaattgcttttccgcctgccgctccgagcataattgctttctttttcttcattgggcatacctcctgcctggcggcgtgtttaagatattcttcacctgggtattgttcttctaatcctatcaatatatctattatacctgaaaaattaacttatttaatgaaaatatgtttacaaataaagtataatctgtaataatgcacaataacccaatcaaacttgtttcctatttcttagcggcgaggggtgaagtgaatgggcggttcttctgaacaagaaagattgttggtgtctattgatgaaaaaagaaagttaatgatagatgccgctagaaagcagggatttacagggcatgacacgatcaggcacagtcaggagctggattgtttaataaatgaatatcaccagcttatgcacgaaaacgaacattcccaagggattcaaggccttgtaaagaaattaggcttgtggccccgcagagatgttatgccagcatatgatgcaaataaatagcggcctatcagatgcatatataaagagagagcttttcggaagcgctctttttttctggaaaaaattcatatgaaagggggaactaatgaaggaactggcgattctcattaccgaaatggtcaatcaatttcatgatgcttttatttccttatgcggaatatttggcatttatttaactgacaaagaaatgcatttttgggtgatcggcatttttggcatattctttttcggcgtcactcacgctgtgtttacatggctttctaaatggagtatgacagccttgtcctttatctataccgttacagtcatcattgtcatcgtatttgcgattgagattcagcaaaaggtgacggggagagggaatatggagtttttagatgccacggaaggtataaagggttttttagtattttttatgttttttttgcttttgaaaatgctgttgcgtttcatcaaaatccttttttctggaagaccagcaagcaaatcgaatggcaatacccgatcacgaagataaaaaaccctcctgacatggtcaggggggttatgaagcggatacagggagggtgattgtcacctctgtgcctcttcgcacttcactttcaatatgaatagagcctccgtacatcagcacgatccgtttacaaacaacaaggccgagaccggttcctttttctttagaagtaacaaagggaaggaagatgtgatccagcatttcctgagaaatcccttcaccgttatccacaactttgattatggcttttttatctaaagctcccagggagatcgtcagtttgcctccttcaggcattgactcgaggccattttttgctacatttaaaatcacttgtttaatatgatcttttgtacattttacgagtaagggctgctcggttaaatactgtaattcgacttcaacattgtatagattgccctcagaataaatgatcggcataatttctccgataatgtcctgaagtgagttcagctcccatttttcagctgtcggcttgccgagaacaagaaactcactcactatttgattgatgcgcttgatctcctgttcgataatggagaagtaaagctgatcttcctcacctttatatttcttttgcaacagctgaataaagccgcttatgccggtaagaggattacggatttcatgggctgtgctggcagcaagcgtcccgatcagctctaatttttgcgcctcattttctgagcgctccagctgggtctgccgcttcagcaaataatacagcacgagaataaaaaggatattcagcagaacaataatacatgaaagcggaagcacaaggcttttcgtcagttcttctattgtgaccgggttcggatagactttcatattccagctgatatcatccagatatccgctgacaggtttctgatcctctgcatgagatgcttgtccgctcgcaaaaatcattttcccgtcttggttcacaacttcaatataaacatcagggcttagtaagttaatgagatttttcaaataatcaatttgaatagctgcgacaagataatctgtcacattacgttttgagtccaaaacagggacacaaattgtgaaaattggctgaccagtaattctgctcgaataactatctgaaatgactgtctttttagtttcctttgcttttgtaaaaaaagatctgtcggccaggtttacattcgtttttaattcggttgtgcttgcggtgacgtctcctttggcattgagaaaatagagaccggaaaatctcggctctgaatcaaaggtcttttccaaaattgactgcattttctttatatcaaccggtctgtcaatggcgatggacaaggaggtcattctcgccattgtttctccgattaaataattgattttgttgcggtgaaggtttagcaggacacttgcttcttgtttatgttctgcagctattgtatctttttctttttcatatacgaaaaagctgatgacgattgccggaatcacgaccagtatgatataaagtttgactctcccgcaggcgccttttagtattttcaatttgcatcgctccaacatacacctgattagaggtattatatcattgtttcttcttctttaataagaaaaaataaccaaaaaaattagaaaaaggtgttggcaagcttacattttaaaaaagaagagaaatattggaaagatttttattgacattttggtctttgtttattaatgtttctctgtaacggtttctaaaaggatgattgagacatgacagaaaaatcactgaagttatttatcgtgctgtcgcgcgcgtatcggtctattaacgatcatatgaataagcatattcataagcatgggctgaatccgactgaatttgctgtgctagagcttttgtaccataaaggcgatcagccgctgcagcagataggagataaaattctcttggctagcgggagcatcacatacgttgtagataagctggagcaaaaagaacttctcattcggaaagcgtctcctacagacagacgagtgacatttgcgcaaattactgaaaaaggcatcggtcttttgaacgatattttccctgatcacgctgctgaaattgatgaaatgatcagcgtattaagcgaagaagaggtagagatgtgcaccgaaatgttaaaaagagtaggattaaacgcaaaacagtttcataataagtaaaaaaaggaagcctgatatgtcacaaggcttccttttttgctatttttcatttgtttccgctgcgcctctcggcaaaatgagaacttcaacccgccggtttttgcttcggccttccgcagttttattggaagccaccggtttatactcgccataacccttggcgctgaacacttttgcatcgagcttggggttttcaatcaggagccccataaagtttaccgctctcatgacgcttaaatgccagtttgattggaattcagaatttttaattggcatattatcagtatgtccgctgataatgatatttcttggcgggttaatcacaagaagatttgaaatctcttttgcaagcggcacatcttccttacggatggtcgcttttccagaatcaaagaagatgctgtctttaatcgtaatcagaaggccttcactagtcatcttcgtctccagctgatgttccagctttttatctttgatgaacttttccacctggctcttcacattttcaagttcttcttgatcagctgctttttctttttctttcttgtttttctctttctcttctttttcctttttcacttcatcgatgccgtctgactcgttttcaggaggagtgacactggagtagtccagtacaccggtgccgcctgtaaagacttcattaaatgattttgagagcatttgaaacttagctgcgtcaatcgagctgctcgcgtacagcacaataaacaatgccaggagaagagtaaggatgtcggcgtaaggaacgagccatgattcatcaacgtgctcgtcctcatgcttcttcttcttttttctcgccattttgcgcctctccttgttctgcaaatttcaagcggtccttcgcaggaagatacattaaaagcttttgttcgatgactttcggtgcttgtccttctaaaacggataaaacaccttcaatcatgacctcacgcagttttacttcttgttttgattttcgttttaatttatttgcgaaaggatgccataacacataccctgtaaagataccgagaagtgtggcaacaaaggcggcactgatggcgtgtccaagctcatctgtattgtccatatgagagagagcggcaatcagcccgattacagcgccgagtactccaagtgtcggagcgtacgttcctgcttgtgtaaaaatagcggctccggcttggtgtctgtcctccattgcttcgacttcctctgtcataatatctctgataaattccgcgctttgcccgtcaacagccatgctgagcccgtttttcaagaaagcatcatctacatcctcaatgcttgcttctaaagcaagcagaccttcgcggcgtgcaagctgagcccattcagagaacataggaatgagttcctctattgtgagctgtttattttccttaaataacactcgaaacagcgcaggcacttttttaatttcttttgttgggaacgcaataacgactgctgagattgtcccggcgataataattaaaatggcagcggggtttgcaagggcgctgaaactgacgcctttcagaaccatcccgacgctcaatgccacaaaagcaagaataataccgattaacgaagttttatccatagtttttcaccaaatccttttttactatcttgtctatggttaatatcggttttggtgcccggaactttagggacattgtgaatttgttcatgaaatattcaaggaagaggcatagaagggagaaataaacaaaaacgggctctccaaaattgaaaagcccgggtgtctactgaaattagcagctttcttgcaagctgtccttcagatggtattcatataatagtagaaatacatattcactgtatataaacatgttccatccctccttaaaaaaagtgtaaaggatgaagggaagtagcgcttcaggggaagggacggtattttctaagtcaagagtatgaaagcataaaaaaagcggcttcctaaaaggaaaccgctgattgttatttcgctcgcactttgattttatcatcttctaaaatcacgtgaaaacttgtgatctcgccattatcaagcagcagatcggtcatttcatcctcaacccattcttggatggttcttctaagcggacgtgcaccgaatgaagggtggtagcccagctcagcgattttttctttcgcttcatctgtcacattcaagctaatgccccgttccgccaatgtttcttcaagttctccaagaagaaggctgacgattttgacaagatgttctttttccaatgagcggaactcaataatgctgtcaaaacggttgaggaactcaggtttaaagaacatgctcagtgaatcaattaatgtttgttcttcgatgacactgtcatctgattggaaaccgactttcgtttgtttctcaccagcacccgcattacttgtcatgatgatcacagtgtctttgaagcttacggttctgccttggctgtctgtcagacggccatcttccataatttgcaggaacatatgctgaacgtctgggtgtgctttttcaatctcatccagcaacacaatgctgtaaggattgcggcgcactttctcagttaattgtccagcttcctcatggccgacatatccaggcggtgaaccgataattttagatacggcgtgtttctccatgtattcgctcatatcgagtcggataatagcgtcttttgtgccgaataattcatctgccagtgttttagaaagctctgttttccctacgccggtaggaccgacgaagaggaaggagccgactggtctgtttttggattttaaaccggcgcggcttcgtcttaccgcctttgccactttttgaacagcggcttcttgtccaatcacgcgttcatgaagttttgcttcgagttctttcattttcgtttgttcgtctgcctgcagtttgccgacagggatgcctgttttttgttcaacaatttcctgaatgtgctcagcttccacagtgacagcagtatgagcggaggagctgttcagttttttctccaatgcgagttcttcatcacggagttttgcagccagttcgtaattttcttcttccagggcttttgttttttcggcttcaattgcagttaagcgttcagcggcatcctcatcattcagttcatcaattaacaggttagcttttgaacctgcttcatctaataaatcaattgctttatccggcaggtgtctgtcctgaatgtagcgggatgataaagtgacacacgctttgattgcttcatcactgaatgttacgccatggtacgcctcgtatttgtctttaatcccttgcagaatgaggatagcctgttcaattgaaggctcctgcaccatgacaggctgaaaacgtctttccagcgcggcatctttttcgatttgacgatattctttcagtgttgtcgcgccaatgacttgcagttcgcctctggctagggccggtttgagaatgttgccggcgtccattgatccttctgcagagcctgcgccaacgagaaggtgaatttcatcaatgaacagaatgacattttttcgttccttcagctcagtgatcagctgtttcattctctcctcaaattggcctctgatccctgtgtttgcaacaagggatgcaacatcaagcaaatatagctctttgtttttcagtttgtttggaacatcaccttcagcaatttttaaagcgagcccttcagcgatggcagttttccctacacccggctcaccaataagaaccggattgtttttgttccggcggtttagaatttcgatcactcgcgccacttcatcatcacggccgatgacgggatcaatgagaccggctttagcaccgtttgtaatattttgagccagctcatcaagcagccctttttttccgctttgttttgctgcgctcttttctttcggctggaatgcctgttcaaacggaaatccgaaagattgaggacccatactcattgaaggtttacgggtcagttcgttatagcaagtttcacaaagaaccatctgtttatgaacggaatttatttgcatgttaaggcgaatcgtcgcctcgttttgatgacaatgttgacaacgcatttgccaaaacctccttaataatttgatcttctttgaccaatgaaagtgaataaaaaggtctattggatttgaccttctttgactattagtatacggcaaacttaacggctttcaaaccaatatgctcaaagcagactgaatatttgactatctttgaccaattggtttttaaaaaaggccggtttgtttgaccaactttgattaatagtatactctgaccatctttgactttcaagccttttgcacaacattttttaatttgttacaaagtaaaacatgttttcttcgtcttttcaaggaacttgtctcataggttataaaaaggcatctatggacaaaactgcggttcgttcggaggggagaaatggaacaatcaaaagggtctgcaagtcagcttgcttttgtgtatgtcggcacagtagtcggagctggatttgcgactggcagagaaattgttgagttttttctgaagttcggctggttcggtttattcggcattctcgtcagcggcggaatgtttacgtttctgggcgccaagctgatgatcatttcaaagcgaatcaatgccaagtcatatcaagaaatgaacatctttttgttcggggcggcggctgggcgaattatcaatgtatttatgctgtttgttctcctcggagttacatctgtcatgctttcaggagcaggggcgctttttgaggaacaattggggatgtccgctcagattgggatgcttattacaatcggtctgagcttaattgtgatgactagaggagtaaaaggcattttcggtgtcaatgtgtttgttgttccccttttaatcctcttttcaatgattgtagtggccgactcttttatattcagcgaatcacgaaacgcagctcagtgggtctggccgcatcgctgggattggctgttatcagccttttcttacggggctttgaatttatcgcttgcccaagcagttttggttccgctggcgaatgaaatgtcctcggagaaagtgatcaaaaaaggcgctttaatcggagggacgatgctgacgattgtgctgtccgcgagttttctgtctttgtcaactcttccggatgtatttttgtatgatataccgatggcacaagtggtttatctctttgcacgatctgtccatttgatttatttactcattattttcggagaagtgttcacatcagttatcggtaatctatatggattagaaaaacaagtgcaaagctttcttccagtgaaaagcaaatatatctttgcggccattatgatcacggcttatattacgagccaaatagggtacggcaggcttatttcaacgatttatcccttgtttggctatgtgagcctggccttcataggcgctttgctttgcaaaaaagctcctcggcggcgcagtttataaatatatataatgaaacgaaccgtcactatagagcgataattgatctaggaaccggggactgacttttttattgtcaagaaaaacatcattatggtaagatagcagaagtgaaaaaattgaagaaaatccgtgcgatatgcgggagaggttctagctacaccctctataaaaaactaaggacgagctgtatccttggatacggccttttttatgtttttctagagcaccttccgaaaaaaggtgtttttttgcgtgaattagctgtagcgatgtctctcgccggcgtttttattgcggagaaggagaggaatcatgaaaaaagaaaaagcaattgtcgtatttagcggcggccaagacagcacaacatgcttactgtgggccttaaaagaattcgaagaagtcgaaacggtgacttttcattataatcagcgacattcgcaggaaattgaagtggcaaaatccattgcggaaaagcttggtgtgaaaaatcatttgcttgatatgtcacttttaaatcagcttgcaccgaatgccctgactagaaatgatattgagatagaagtaaaagacggcgaactgccatccacattcgttccaggccgcaatttggtattcttatcctttgcgtctatcctggcttaccaaattggcgcgcgccacattattacaggagtttgcgagacagacttcagcggttatcctgactgccgtgacgaattcgtgaaatcttgcaatgtcacggtaaatctggcaatggagaagccgtttgtgatccacacgcctctcatgtggctcaataaggcggaaacgtggaagcttgcagatgagcttggcgcgctggattttgtgaaaaacaacacgctgacatgctataacggcatcatcgcagacggctgcggcgaatgtccggcatgtcaccttcgttcaaaaggttatgaagaatatatggtgatgaaaggagagcgtgcataaattgttatctcaaatttatccgcaggcccagcatccttattcgtttgaactgaataaggacatgcatatctcagccgctcattttatccctcgggaaagtgcgggagcgtgcagcagggttcacgggcatacgtataccgtaaatataaccgttgccggcgacgaacttgacgattcaggctttcttgtcaatttcagcgtactcaaaaaactggtgcacggaaactatgatcacacgctattaaatgatcatgaagatttttctcaggacgaccggtattcgctgccgacaactgaagtcgtggcgaaaacgatttatgacaacgtacaggcttatttagacactttggagaataagccgacctgtgtacaggtgtttgtccgtgaaacaccgacaagctactgtgtctaccgtccgaaaaagggtggtttgaatggctaaaggaattcctgtattagaaattttcggcccgacgattcaaggagaaggcatggtgatcggacagaaaacgatgttcgtccggacagccggctgcgattattcctgcagctggtgtgactccgctttcacttgggacgggtctgctaaaaaagatattcgctggatgacggcggaggagatttttgcggagcttaaggacattgggggagatgcgttttctcatgtgacgatctcaggcggcaacccggctctgttaaaacagctggatgcttttattgaactgctgaaggaaaataacatccgtgcagcgcttgaaactcaagggaccgtttatcaggattggtttacgctgattgatgacctgacaatttctccaaaaccgccaagctcaaaaatggtaacgaactttcaaaagcttgaccacattttaactttacttcaagagaatgatagacagcatgctgtcagcttgaaggttgtcatctttaatgatgaagatctggaatttgccaaaactgtgcacaagcggtatccgggaatcccgttttatttacaagtcggaaatgatgacgtgcatacgacagatgatcagtcactgattgcacatttgcttggaaaatatgaagcgcttgttgataaggtagctgtcgatgcggagctgaatctcgtcagagtgctcccgcagctgcacaccctgttatggggcaacaaacgcggagtataatagaaaggaagatgaacatgacgacaagaaaagaatcagaattagaaggtgtaacattgctaggcaatcaaggtacaaattatttgttcgaatatgcaccggacgtgctggaatccttcccgaataaacatgtaaaccgtgattactttgtaaaattcaattgcccggaattcacatctttatgtcctaaaacaggccagcctgactttgcgacaatctacatcagctacattcctgatgaaaaaatggttgaaagcaaatcattaaagctgtatctattcagcttcagaaaccatggtgacttccacgaggactgcatgaatatcatcatgaatgacttgattgaattaatggacccgcgctacattgaagtatggggcaaattcacgccaagaggcggaatttccattgacccgtacacaaactacggaaagcctggcacgaagtatgagaaaatggccgaataccgtatgatgaaccatgatttgtatccggagacaattgataatcgttaattattccgttgtgtgatacggagtgtaaaaggaagtggagtcacagtaaaatccgaacattcagcgttaattttcagcgaagtgtgaccggagtgtgacccgcactaagctcaataaaagtgggaaaagtcacacctgaaaatggctctactcatgggaattgtattaaaaagtgtgacctgaggtgcaacctgaactgtgacttttatgcagtgaaaaattgatagtacagaagcagattaaggcgtacaatttgtacgtcttttcttttttatccgaaagaaaatatgcctatctagagatcataggcattaaatattattatcaatatcttcatttattttttggctaagtttctgaaccttctctttaacatttgaaacagctcttttttgaatttcatcaaagttctcctgaatatagtcgatgacacttcttattagaacttcactttcaaaattgaatatctcatttatttctgactgttcttcatctgttaggtgatggtattgaagttgtttagcatttacttcagtagctacatcaatcctaacttagttgttctggttgtacaatttcatattcaccttctgtatacttttgctccgcataatggcttccccattgacagagctcctgcaagataggtttaagagattctccaagttcagtggatgaatattcaaccttcggcggtacttgattatacatctttctgctcacaagtccactggcttcaagctctctaagtgtttgaatcagcattttctgagttatatttgggataatgcgctttaactcactcgttctctttggtccattcattaaaaagtataatacaaggcctttccattttccgccaataacttcctttgtcacttcaaacccacagctaaattttttcatgtctaaagctctccattccacatttattactttttagttactatatcacaaaaaagtgggtacttccgataatgggcttactgaaggatactatatcttgtaagttgttcttcaagtacttaaaggtactagacataaaataaaataattctaaaggagtgttaagtatgggtaaatttgaaggtaaaatagcgcttgtaacgggtggaacaagtgggattggtcttgctacagcacaaaaatttgtaaacgaaggtgcatatgtttatatcacgggacgtagacaaaacgaacttgataaagctgttaaccaaattggcaagaacgtaaccggtgttcaaggtgatatttctaagcttgaagacttagacaaactatatgacattataaagcaggaaaaaggtaagttggacattctttttgctaatgcaggcatcggcaactttcttccattaggtgaaattactgaagagcaggttgatagaacgttcgacattaacgttaaaggaaccatctttactgttcaaaaagcgttatcactattcccggacaaagtaggttctattattgtaacgggctctactgctggatcaattggcaacccagcgtttagtgtatatggagcatctaaagcagcattaagagcactggttcgcaactggattcttgacctaaaaggtactgaaatccgtgtaaatgtggttagtccaggaggtattcttacacctgcctacgatgagctttttggtgatgcacttgaagaagtaatggaaaatagcagaaatactgttccagctggaaaagttgggacacctgaagaagtagcaaacgctgtatctttccttgcttcagacgaaagcagttacttgacgggtgttgaattgttcgtagatggcgggctagcacaggtataatttcactgcgcagagattacaaatagtccccaaaaaaggttaatggggatttacttgaagaagtcgtataaaaaagtcgttttccttaaaggacagggaattcgacttttttatgtttgaatttgattaacgttgtaaattcgcattttcctggggctaccactaaatgacctgtaaaaaagattacactgtgaataaatgtacttaaagtaacgggggctcttgacttttaataaaaaataatatccctgtccttgtattctaatacttttgaaaatatttaaaggaatccttatgtcctgaataaccacataggaaaatatgttgtaggttgctttctttttttgtggggcatcccacacaagctatcttgtgatctcacacctgaacgttttttatagactagtaccgcgacaagttatattacatatacataccaataaagtagacattaaaagtgaaagagaggatggaaatgtgtgaaaattcttttccttgagagtcatcccatgtggctctatggtttaccgaatgggtttagggaagcaggacataccgtaatgatttccggtcctgtaagtcgggaaaatatcactgaaatgatagacgaatttaaaccagatctaatagtatctatgggatggacaccagagcattcaagggaaaagcaggcctggattcgcaacgctactaaaaaggtgaatatccctctcgtttattgggctactgaagacccgctgcacactcaaaactttactatcccgttaattaaaaagatgaaaccagattttgttttcacggttacgccttctctgtgtaaaacttatgaaagcatggggattaaagcagctcacttagattttgcatttcacgaaagtatacatcaccagattaaaccattagcaaaatacagttgtgatatagcagtggtggctaatgcttaccctaattttcttgaagaacatccggaagtgttccgttcgtcctctttaaaaacgcttattcgtcctcttatacggaagggtattcgcattgatttttgggggagaaactgggaaaaaatgagtaaatatataggaagagaaattccccccaattggatccatggataccttgattatactgaagcatataaagtttacagttcagcaaaagtcgttatcggtttgcaaaactgtgaaagccaacttacgcaacgcacctatgagattcttggttccggggggtttttattgacatcggatacaccagcagttcgaggtaaattcaaatctggccgcgatctcatcgtttcttcctccccaaaagaaacattggaaaaggttaaatactatttgaatcatgatagcgagagaaaaaagattcagataaacggtaaaaaggctgtaaagaatgattcctatcggcatagagccgagagaatgcttgaggtgctaaaaagcagaggaattataagaaacttaggggaaaccattcattatgtagatgttctcaaagaaaaatacctgatccatcatgttactcccggtgaaacattatcaataattgccaggaagtataatgtttccctgcagcaactcatggagcttaatcatttcaaatcagatcaaatatatgctggacaaatcattaagattagagagaaactgtttagaaatattaataacaaatttttctaaaggagagtaatatgaatgaaggagagaataccaaaaaaggaaatagagcgaataaagtaaaaagaacgcctcgttatatggaatttcccgtgacatacgaagtatataatgtggaatccggcgatacattatggacgattgccaaatcctttaaaattccggtacaacaacttatgaatcttaataagctttcttcagatagaatttatcctggacaaattataaagataagagaaagataatctttgaggtttcggaaacgaatcaaattgaaatgacaatccttatttttttatttgtggggaacttgatatttttggggatgaaggggttatgagatgtttcaaatgagctatttctattctggattaggatgggattttattcaacacgttgatcaaacgaacggagtattaaatgttgtgtctcctgattttttctatatcagaaaagatggatcattacttctccgttcagctaatcccgatgtgattaaagctcttcatagaagaaaattaaaagtagttccttttctaagcaatcattgggatcaggatttgggacgatttgcattaatgaaccgagttcgtttagctaaacaaatttctcatgcaatagaagaactggatttggacggaattaatatcgatatagaaaaccttacagaaaaagatcggaatctatttacagattttattagattagtaaggaaaagtattcctaaacataaagaagtatcagttgcagtggcggcaaatccttttggctggacgaagggctggcacggatcatatgattacgagtatttagctaaatatgcagattatcttatggttatggcctatgatgaaagccgccttgctgggcctaccgcaagtgtaggatgggtggaaaagtccattcaatatgttctgacccaaaaaatctctcctcaaaaactagttttaggattgccattctatggccgctgctggatggaaggccaatctgcctctcaagccattcccctttaccttgttgactccttagtaaaaaggcatagcgggacaattatttttgacaccaagagtcaatctccaaaagctatttttactgtcaatcacgataacaaggggccgttgccttcgggaacatatacattatggtttgaaaatgaacagtcactcagagcaaaaataaaactcgctcaaaaatataatctgaaaggtcttggcagctggagtcttggacaagaagatgtgtcagtctggaatacagtgtttaaaaatatataatgatttatagttcagaacaaaattcgaagataattgcaatgaatctctaaatggacatactgaaaggagtttattacgagtgcgggtaaaacagtgagggcattccataggcccttctcccgaaatgttctatacgaggcattacattgggcttgaaatacacattcaaacttatgttatagtacgcatttcaagtaattacggatgtgttgaatttattctgcttccatgatttaagtcatacacatgctacttgatagcaggattattgcatttcattcagaattgttcaggatcgatatggaagcgcacgaataactagaactttaaaagcatacactcatatacttcctgaatggatgctggtttatctaaaaaacatgatgagaattgattgaccgctctcattaaaggatggagaaattcaaggcgccaaggtacgcatggtgaaacatgacttgttgataatcgaccatatagtttctccttagaaatgagggggtttttacataaaaaagacgagcgaatccggggggaattccactcgccgctttctaatgaaaagacgggatgctggatggcagctcgtctgttttattataatttaacgaacgtatgtttgtaaaggtgtcttttcgaatgaattggttcatataaccgttaagaacagattcattgtaaacattcgctaaggtatgctaagatgcatggactataaaggagtgatatgaagtgaagacattgcggttaaacaatgtaacgttagaaatggctgcatatcaagaggagagcgagccgaagcgaaaaattgcatttaccttaaacgttacgagtgagacttaccatgatatcgctgtcctgttgtatgaaaaaacgtttaatgtcgaggttccggaacgcgatcttgccttccggggggaaatgacaaattattcaacatcattgaccaacctgtacgaaccaggggccgtcagcgagttctatatagaaataacagaaatagacaaaaacgccgattcatgatcggtgttttttatgtaaaaaagctgccggccggcagcttttgagaaagcgaatttcatatgtaaggtgttaaattgtccgtcttgcagttttttgaataaatgtggaaataaggaggttttaataggagtctctgatgatcttataatttttatgattaacaactgtcaatgaatctaactcaagatcccgatagttatccatgatcgtcacatcaacgataacagaattctcatttactttttcaacaacaccggttaatccgtttttaaattcaatgacattcccaaccttagcgattttcacaagcttcctctcctttaaacataataatgccttttgaaagtattttgcagtattttcattgagaagtaaagcgataaggagttttatctcccttatgaattgtcctgtcgctataaagatgatatattgattttcgtcaatagaaagaaaaggggggaatttttgttgcgtcccgaagaaataacagaaatgattgaacagctgcgcaccggcgccataaacgaactgagagtccagaaagagcattttcttgatttcagggccgtgttatctaaacaagatgattttaaacatttccgaggaattgcccagcaaggcggagatgttatctttcaatacttagaacagccaagaagctgaaggtttctcatacgtgagaagcctttttatcatatatgacagaacacaagccttttattacagctgtctgtaacaggtgtaataaaatgtaaagtgtcaaaaatggataaacatgttttaatttgacaatatttatagaatttcaaactgtttttttgccattaagcagtgagtcatcctctttattccatcctgatacctccttgggagagttggaaaatctttttccgtgaaaatgaatggatctcttgttaaggttatgaagtgttttttggagcactttaaggaggaaactgtatgacaacgaaattcactgctctggctgtttttcttctttgtttcatgcctgcagccaaaattgagcatacacaagcttcactactgagcgcaaagaagacaaaacatgaagaagcgaaatggcttacacatatagatcgaaatacgaatgaatctttcccttcactgtctgctgataaagacaagaaaataaaaccgattaagctatcagcacacactgaaaagaaagagaaagataaaccggacaaaacaaatgatgagaaagaaacatatacacagtctgaaaaagagttgctgtcacgtctcgttcacgcagaggccaaaggagaatcatataaaggcaaggtcgctgtagcaagcgttgtactgaacagaacggagaaaaaaggttttcctgatacgataagaggagttatttatcagaaaaacgcctttgaaccggtcgcaaacgggagcattaaccaaaagcctgataaagaatcgattgaagctgccgaagaagcgctgtcctcaaaaaatagagaaacagatgccatattcttttataatccgaaaacagcgtcagataattggattcgttcaagaaaaatcgtagaaaaaatcggcagacacgtttttgccgtctaagcatagaagagacaatttgtctcagctgtgcttttttcatataaagagtaaaaataaaataatttttgaacttgtctcatatgatgttggtagtacaagagacaaggagagacatcatgaatcgatttgtgaaagggatcattcttttatccattgccgcctttttcgctgaatgccttgaatttgtcgtcaatatgattttggcgcgggagcttggcgagcatgggatggggctttacatgagtattttgcccacgatctttttaattattgtcatcgcgagcctggaactgccgatatccatttctaaattcattgccgagtcaaatcctaagcttcatgaaagcatgctgaggcacgctttcagaatgacagccatttttactgctttttctactgtcgccgctagtattgcgcttccgtttataccggtatttgatacataccacccgtttattaaagggattgtcatcggcttaattcctgttgtcgcctttacttcaatcgccaggggctactttatgggtgtgcagaaaatggggaagatcgcaattgccaatgtgctgaaaaaaatcatccagctcttgtgcttattcctcttttttcaatggtactcatttgaattggacatggctgtgctgatttccttgtttgttctagtcgtgagtgatgtggtcgtgcttgtttatttatattcacaatttatcatggcaaggcgggcgttatccggccagcagcacattcatttgcgcggaaaggatgtaaggaaaagactgcttgctgtttcaattcctacaacaggactgcgtatttttcatgcggttgtcaatgcaattgaaccctttttagtaaaaggagctcttttggctgcgggcgttgccgggacagcggcgatcgatcaatacggaatgctggcaggagtggctgtgacgatagggtcgttccctgcttttattgcccattcgttaatggtcgtcatgataccgagtatttcggaagcttatgcactttctcagtatgacatcgtgttaaaaaggctgaagcagtcgattttcattacattaggttacggtatacctgccgtctgggtcatgttccagtttgcgggacctctcacgcatttgttttttcactctcctgaagcgcagtattatttgcagctgttgtggccttactttctctttcatctgtttgtcatgccgctgcaggcgtgcttaatcgggatgggttttgtgaaagaggctttttatcacaatgtatggagtcatatcgttgcgctaagtatgatgtatgtactgggatcaatggagaatctgcaaatgctcgggattatccttggaatgaacactggcatgattcttttgacgagcctgcactatgccacgatctgcaaagcattgaaggtatccgtattccttacgggagggaccagaacgccgcgaattgaaggatgatataggaactgcaggggcaagctaattgaaaagcatgaaaggaagattccatgttgacgaagcgcttgcttactatatacattatgttattagggttgattgcatggtttccatgtgcggcacaagctgaggaaaaacagcctgctgttcccgctgtttttcttatgaaaacgatagaaggggaggacatctcgattccgaataaagggcaaaaaacaattctccatttttggacgtcatggtgtccgccctgcaaaaaggagcttccccagtttcaatcgttttatgatgcccatccatccgacagtgtaaagctggtaacggtgaatttagtgaattcggaacaaaatcaacaagtcgttgaagattttattaaagcaaacaagctgacgttcccgattgttcttgactcaaaaggggaattgatgaaggagtatcatatcattacgatcccaacatcatttttgctgaatgaaaagggagaaattgaaaaaacaaaaattggcccgatgacagcggaacaactgaaggaatggacggaagaatagctgagagcatagactctcagcttttttcatatagagaagaagcgaataaacattaatgataattattatcaaaaagaaattaaaataattataattgaaattctcttcgtgcgtgctataataaaggaagacatcaagaaataactgacgataaagctgccttttgggcagcgattttgtttttataagagaaatgaagatgatttacgttctcaattagagaggagaattcgatatgaatgaacaagttatcgttcaacgcgacccgcatgagccattgaaaacagacaagagggaaaaaaactgggcacagcacgcggagcttattgcagcacttgtatcaggcgctcttattttggcaggctggctcttatccggatatcaggtattatccataatacttttcttgctggcttttgtgatcggcggatttgctaaagcgaaggaaggaatcgaagaaacactcgaagccaaaacgctgaatgtagaacttttaatgattttcgctgccgttggttccgccttgatcggatactgggcagagggtgctattttaatatttattttttccttaagcggagctttagaaacatacacgatgaataaaagcagcagagatttaacgtctttaatgcagcttgagcctgaagaagcgacattgatggtcaatggtgaaaccaaaagagttccggtttcagacttgcaggccggtgatatgattgtgatcaaacctggagaacgcgtagcggcagacggtatcattgaatcgggctcgacaagtcttgacgagtcggctttaacaggtgaatcaatgcctgtagaaaaaaacacaggcgacactgtattcacaggaacggtgaatcgcaatggctccttgactgtccgtgtcacgaaagcaaatgaagattcgttattcagaaaaattatcaaactggttgaatcagcgcaaaatagtgtttcacccgctcaggcttttatcgaacgatttgaaaatgcttatgtgaaaggtgtgctaattgcggtggcgctccttttattcgtcccgcactttgcgctgggctggagctggagtgaaaccttctaccgcgcaatggtgtttatggttgtcgcgtcaccttgtgcgcttgtcgcctctattatgccagcggcgctgtccctgatttcaaatggcgcccgcaacggtatgcttgtgaaaggaagcgtctttcttgaacagctgggctcagtgcaaatgatcgcctttgataaaaccggcactgtaacaaaaggccagcctgccgtagagacgatcagaatagcagaaggattcagtgaagcggaagttcttgaggctgtctatgccatcgaaacgcaatcaagccatccgctcgcccaagccataacggcgtacgctgacagccgtggcgtgaatcagtccggctacatatctatagaagaaacctcagggtttggcgttatggcagaagtgtcgggtgcgatatggaaggtcggtaaagcaggttttatcggcgaggaaatggcagcacaatttttgaaacaaacagcatccgatgtcattcaaagcggtcatacaattgtatttgtgaaaaaggatgatcaaatagtatgctgtatcgcactgaaggaccaaatcaggcctgaagcaaaagaggtcatggaagaactgaaccgacttgggattaaaacggccatgctgacaggagatcacgaagacacggctcaagcgattgccaaggaagccggcatgacaactgtcgtagcagaatgcctgcctgaccaaaaagtgaatgaaatcaaacggttaaaagaagaattcggaacgattgcaatggtgggtgacggaatcaatgatgcgccggcactcaaagcggcggatgtcggcattgcgatgggcggcggaacagatgtagcacttgagaccgctgatatggtcctcatgaaaaacgatttgaaaaagctcgtaaacatgtgccgcttgtctcggaaaatgaacaggatcatcaaacaaaatatcgtgttttctctagctgtaatctgcctgctgatttgtgcaaactttttgcaggcgatggaattgccatttggcgtgattggtcatgagggcagcacgattttagtcatactaaacggtttaagactcctaaaataaagccagcagcctaatcaggctgctggctttttatgtatcaagctttcccttcatttttgtctttatcagatcttttcataaccaggatgagagcgaggatgcagcaaaggaaacccgctgcacagcctatgatagagctgtaataataaaagcccaccatcttcatcccgataaaaggagcggaaattcccaaaaccgttaagagcataactgcttttcgtctgaaaaaattcatcagcaaacggaacaaccccctgcgattgaacgttactgtcagtatacaggaagaggagcaggaaataaaatgcattagaaaatgaaggcgtcgtgaaaggcaaacaccggtaaaacctgttacaatggaagacagaacaatgcattgcaaatggcagggaggaacaagaagtgaatagaatacaacgcgtctcttcatggctgaaggaagcggggcatactgccgcatttattcatacaaaagaaaatgttttttacttaaccggtttttacacagagccgcatgaaagattaatggggttatttatttttcaagaagaggagcctttctttgtttgtccaggaatggaagcaggacaggcccgcaacgcaggctggaatcatgaaatcattggctatgcggatcacgaaaatccatgggagctgatagagaaggccttgaaaaagcgaaatatcagcatacatacgcttgcggtagaaaaggattcaatctcgctatcacgtgcagaacagctgaagcatgcgacgggcggggctcaatttgtttcagcagaagaaacactcaatcaatttcgcctgattaaagaagacaatgagattcgtttgctgaaagaggcggcaaagcttgcggattacggtgttgaagtcggcacagccgctttgcgtgaaggcatcagtgaagtggaagtgctcgctcaaattgagtatgagctgaagaaaaaaggaattcagggcatgtctttctctacaatggttttattcggagaaaaatcaggccagcctcatggaaatcctggtacagccacgttgaagaaaggtgattttgttttatttgatctcggtgttattcttgacggctattgctctgatattacaagaacgtttgcatacaaaaccatcaatccgaagcaggaggccatttacgagactgtgcttcaagcggaaaaagccgcgattgaggcaagcaaacccggtgtgagaatcggagatctggatttaacagcccgtggaatcattgaaaaagcgggatacggtgactattttcctcaccggcttgggcatggactcggaatttctgtccatgagtatccatccatgagccaggccaacgatacactgttgcaggaaggcatggtctacacgatcgaaccggggatttatgtgcctgagatcggcggcgtgcgcattgaggatgacgttcacgtaacaaaggacggagcagttgctctgacccaatatccaaaggaattaatcatactgccgtaatagaaataaaaaaggactttgttctcgacatcgtccttttttatctgcattaaataaaaaaatcatcaaatgttcgaaagggtttaatttcatgtttttggttgagaggttttacagcaagacagctgccaccgagaacagtgagacataacccaattaaaatgaagaaacccatgtgatcttctcctttcagcttaaaacacaaaaagatatctggtacgtccatatcatattgtatgaaacgcattccagatcaaggggatttagaaagaagggaatctatggctaatattaaagacattgcagaaaaagccggtgtctctgttacaacggtttcccgagtcataaacaatcatccatacgtcagtgaagacaaacgaaaaagagtgtttgaggcaatggaatcattggagtacacgagaaatattcacgctgtacatttgtcgaaaggattttcaaacatgattggtgttgtcttgccaacggttaatctgccatattttgcagagctgattgcaggaatagccgacgcagccgcggaatccggggttcacctctctttattccaaacaaactatgaggtacaaaaagaaatctttgcgctgtcccaattaaagcagcgccaggttgacggcctgattttttgctcaaaggcgcttgctgatgagaaactcatggaatgggagggcccgattttgctttgccagaattcagataatgcccgcttcccaaccatcagcattcctcaccaagaagcatttcggaacggcttggactatttaattgccaaagggcacaaaaaaatagccatctgtttggcaagaaaaaaaggcatgaacagccattttcgaatcaaagcctacaaagaggcattggaagagatcggcgaggcatttcgtgaagactgggtaattgagaaagcgattacaattaatgatgggaaggcgctttttcataaatggaaaacgtggaaggaaaagccgacggctatttttgttgccaatgaccaagtctcagcagggctttttcttgaagcaaagaaccagcgggtgtcagtaccggatgagcttgcaatcttaagcgttgataaccacgaaatcagccaagcgcttggaatcacaacgatcgatattcagacaagggaaatgggaaagcaggcatttgccatactggaaaaaagaattcaaggacagccaattgaaaggaaagttctggattaccgtctcatcgaaagatcgactgtttagtgaatgcattgaaaaaaggtttgacgtgcattccgttcgttatgtacgatatgaggtattgaatgacaaaggagctgaggatcgtgaatgggtccttcacagtgaaaaaggtactgaataataacgtattaattgcttctcatcataaatacagcgaagtcgttttaatcggaaaaggtattggtttcggaaaaaaacaagatgatgtcattgaagataaaggctacgataaaatgttcattttaaaagacgagaaggaacaaaagcaatttaaaaagctccttgactatgttgatgaaaagctcgttgatatttcaaacgatgtcatctatcacataagaaataggactaatcactcattaaatgaacatattcacattgcgttgacagaccatatcgcatttgcgatcaaaaggcagcagcagggatttgatatgaaaaatccatttctaatggagactcagtcactatatcctgaggagtaccaaattgccaaagaagtcatagatatgatcaatgaaaaagcgggaatctgccttccggaaggggagattggttttatcgctctgcatatccattcagcattgacaaaccgtccgctgtccgaggtcaatcagcactctcagctcatggcgcagcttgtcgaggtgattgaagactcatttcaaatgaaagtaaataaggaaagtgtcaactatttgcggctgatcaggcatatcagatttacaatagaaagaattaaaaaagaagaaccgactaaagaaccagaaaaattaatgttgttattgaaaaatgaatatccgctatgctacaatacagcttggaaattgattaaaatcttgcagcaaacattgaagaaaccagttcatgaggcggaagcggtttatctgacgcttcatctgtaccgattaaccaataaaatttcataaattcagtttatccttataacgtgttactgattcgatcaggcatgagtgattgagggaaaaaaacgggaagttcattctcgttcttttgcgcacccaattttgctcatgcctttttgttgtgtaaaagggcaaatgtaaacggttaaactggaagacttacgcctgtgaattcgttgtcatgatttttagctgtaaggtcagactagtaaaaagaggaggtcaattcttatgtttaaagcattattcggcgttcttcaaaaaattgggcgtgcgcttatgcttccagttgcgatccttccggctgcgggtattttgcttgcgatcgggaatgcgatgcaaaataaggacatgattcaggtcctgcatttcttgagcaatgacaatgttcagcttgtagcaggtgtgatggaaagcgctgggcagattgttttcgataaccttccgcttcttttcgcagtaggtgtagccatcgggcttgccaatggtgatggagttgcagggattgcagcaattatcggttatcttgtaatgaatgtatccatgagtgcggttcttcttgcaaacggaaccattccttcggattcagttgaaagagccaagttctttacggaaaaccatcctgcatatgtaaacatgcttggtatacctaccttggcgacaggggtgttcggcggtattatcgtcggtgtgttagctgcattattgtttaacagattttacacaattgaactgccgcaataccttggtttctttgcgggtaaacgtttcgttccaattgttacgtcaatttctgcactgattctgggtcttattatgttagtgatctggcctccgatccagcatggattgaatgccttttcaacaggattagtggaagcgaatccaacccttgctgcatttatcttcggggtgattgaacgttcgcttatcccattcggattgcaccacattttctattcgccgttctggtatgaattcttcagctataagagtgcagcaggagaaatcatccgcggggatcagcgtatctttatggcgcagattaaagacggcgtacagttaacggcaggtacgtttatgacaggtaaatatccatttatgatgttcggtctgcctgctgcggcgcttgccatttatcatgaagcaaaaccgcaaaacaaaaaactcgttgcaggtattatgggttcagcggccttgacatccttcttaacggggatcacagagccattggaattttctttcttattcgttgctccagtcctgtttgcgattcactgtttgtttgcgggactttcattcatggtcatgcagctgttgaatgttaagattggtatgacattctccggtggtttaattgactacttcctattcggtattttaccgaaccggacggcatggtggcttgtcatccctgtcggcttagggttagcggtcatttactacttcggattccgatttgccatccgcaaatttaatctgaaaacacctggacgcgaggatgctgcggaagaaacagcagcacctgggaaaacaggtgaagcaggggatcttccttatgagattctgcaggcaatgggtgaccaggaaaacatcaaacaccttgatgcttgtatcactcgtctgcgtgtgactgtaaacgatcagaaaaaggttgataaagaccgtctgaaacagcttggcgcttccggagtgctggaagtcggcaacaacattcaggctattttcggaccgcgttctgacgggttaaaaacacaaatgcaagacattattgcgggacgcaagcctagacctgaaccgaaaacatctgctcaagaggaagtaggccagcaggttgaggaagtgattgcagaaccgctgcaaaatgaaatcggcgaggaagttttcgtttctccgattaccggggaaattcacccgattacggatgttcctgaccaagtcttctcagggaaaatgatgggtgacggttttgcgattctcccttctgaaggaattgtcgtatcaccggttcgcggaaaaattctaaatgtgttcccgacgaaacatgcgatcggcctgcaatccgacggcggaagagaaattttaatccactttggtattgataccgtcagcctgaagggcgaaggatttacgtctttcgtatcagaaggagaccgtgttgagcctggacaaaaacttcttgaagttgatctggatgcagtcaaaccgaatgtaccatctctcatgacaccgattgtatttacaaaccttgctgaaggagaaacagtcagcattaaagcaagcggttcagtcaacagagaacaagaagatattgtgaagattgaaaaataagggtgttagtacgccgtgcttgtcagatgacaagtacggttgtatgatataatattgtgaagtaataaagctttaagttaaaaggagaatgataaaaatggcacaaaaaacatttaaagtaactgcagattctggaatccatgctcgtcctgcgacagttcttgtacaaactgctagcaaatacgacgctgacgttaatttagaatataacggcaaaacagttaaccttaaatctattatgggtgttatgtctttaggtatcgctaaaggcgctgagatcacaatctctgcttccggagctgacgaaaacgatgctcttaacgctttagaagaaacaatgaaaagcgaaggactcggcgagtaatgcaagaattaaaagggattggtgcttcagccggcatcgcgattgcaaaagcataccggcttgaagagccagatttaacggttgaaaagaaaaacatctctgattctgaagcggaagtaagccgttttgatgaagcgattgcacgttcaaaaaaagagctcgaaaaaatcaaagagcacgctttgaaagaactgggtcaggataaagctgatattttttctgctcaccttttagttctcagtgaccctgagcttctgaaccctgtgaaagaaaaaatcagcactgattcagtgaacgctgaattcgctttaaaagaaacgtcttctatgttcgttaccatgtttgaatctatggacaacgaatatatgaaagagcgtgcggcagatatccgcgatgtaacaaaacgcgtaaccggccacctgcttggcgtcgaaattccaaacccaagcatgatctcagaagaggttattattgtagctgaagacttaacaccgtctgacacagctcaattaaaccgtgagttcgtaaaaggattcactactgatatcggcggacgcacatctcactctgccatcatggcacgttctcttgagattccagcagttgttggaacgaaagcggcgacaggcacgatccaaaacggcgtgactgttatcgttgacggtatcaatggcgatgtcattattgacccatctgcggaaactgtaaaagagtatgaagaaaaacataatgcttatttggctcaaaaagctgagtgggcgaagcttgtcaatgaaccgactgtctcaaaagacggacatcatgtagagcttgcagcgaacatcggtactcctgatgatgtaaaaggtgttcttgaaaacggcggagaagcagttggcctttaccgtacagaattcctttacatgggaagagatcagctgcctacagaagatgagcagtttgatgcttacaaaacggttcttgagcgtatggaaggaaaatcagtcgtcgtgcggacacttgatatcggcggagacaaagagcttccttacctgcagcttcctaaagaaatgaacccgttcctgggatatagagcgattcgtctttgccttgaagagcaagaaatcttcagaacacagcttcgcgcgctgcttcgtgcaagtacatacggaaacttgaaaatcatgttccctatgattgcgacagttaacgaattcaaagaagcaaaagcgatccttcttgaagagaaagaaaagctcgtaaaagcgggacaggctgtatctgacgatattgaagtcggaatgatggttgagattccgtcaactgcagtcatcgctgatcagtttgctaaagaggttgatttcttcagtatcggaacaaacgatttgatccaatacacaatggcagctgaccgtatgaatgaacgtgtatcttacctgtatcagccatacaacccggcaatccttcgcttaattacactcgtaattgaagcagcacacaaagaaggaaaatgggttggcatgtgcggagaaatggcaggagacgagattgcgattccgatccttctcggcttaggcttagatgagttctcaatgagcgcaacgtctatccttccggcaagaacacaaatcagcaaattgtctaaacaagaagctgagtcattcaaagagaaaatcttatctatgagcacgacagaagaagttgtcgcgttcgtaaaagaaaccttcaagtaatgtacaaaaaccagacggcctccggcctgtctggtttttttcataagtaagggcatagaaggacacaataacatggctaggagggatagtatgtcaaaccaatttaacgcaggagatactgtttatgtgatctacagaaatccgcacgctgccaatgtagctcacataaaggaagccgaaattgtgcaccatccataccatgaaggcgagctttccctgtttatttatgaaacctatcatccgttcgcagaggacgatgctgtgtttgcaagctatgaagaagctaaatcgctttacaaagaactgtttgatattgatccgtatgagtaacaaggaaatcattacaactcatatcctttccgcctagtgagaaaagtaacgttagtaaaggaaaaggatgtggcatcatgcagaacccatttgttccgcagcttgtgtatatagaaccgagggcgctggaatatccgctgggccaagaattacaagataaatttgagaatatgggtattgaaatcagagaaacgacatcccacaatcaggtgcgtaatatccctgggaaaaatcatcttcagcaatatcgcaatgcgaaatcaactttagttatcggtgtccggaaaacattaaagtttgattcatccaaaccctcggccgaatatgccattccgtttgcaacaggctgcatggggcattgtcattactgctacctgcaaacaaccatgggatcaaagccgtatatcagaacttatgtaaacgtcgaagagattttagatcaggcagataagtatatgaaggagcgcgcaccagagttcacaaggttcgaagcatcatgtacgtcagacattgtaggaattgatcatctgacacacacgctgaagcgcgccattgaacattttggccaaagtgatctcggaaagctccgatttgtaacgaaatttcatcatgtcgatcacctattagacgcaaagcataacgggaaaacgagattcagattcagtattaatgccgactatgtgattaaaaactttgagccgggaacttcacctcttgataagcggatagaagcggcagtaaaagttgcaaaagcaggctacccgctaggctttattgttgctccgatttatattcatgaaggctgggaagaaggatacagacatctgtttgaaaagctagatgctgctttgccgcaggacgttagacatgacattacgtttgaattaattcaacaccgttttacaaaaccggccaaacgagtgatagagaaaaattatccgaagacgaagctcgaattagatgaagaaaagcgccgttataaatggggccgttacgggatcggaaaatatatttatcagaaagatgaagagcatgcacttcgagaggcacttgaatcctatattgatacctttttccctaacgcaaaaattgaatatttcacttaaacgggctgttgtgatcaacagctcgcttttttataaaaaggatttttccattccatcaaaacgccgtaattcaatgattctttatcctccaaataattgctgactacacgaataggtgaacgcccgcaacggaggagaaaggacagcacagggtcgtttttcctgccttccatcacatcttcaacgtactgaacagcgctgatctcgtgtgcgtatttataatacaaaggaatgcggccgccgccgagaaggcgttccagtcttttatcaacagtcagctcatacatcgtattcatcagccattttccgattccaagctttcgataatgaggagaaacagaaatatccactacatataaagtatttccatgaggttcatgatttttaatcgatccgttgtcagttgcttgtgcccatgtatgatcaggagattcaggctcaaattgtacaataagagcagtcatggaaccgataattctgtcattgatgagcgcgcataaagcgccttccggaaaggttttgatatggctggcaagctggtcctctgaccacagcaattcctggggaaacggaggagggaaacattcttcttgaagagaaatcagcctctcgatgtcagtctcagtgtagtttctaatggtcagagcctcaaattttctgccgtcatgcacatacatttgttttagtatgatcatcactctccttatgttgtttcattataacgaagattgaattttcagtaaatatattccgattttcttataatttattttttgattattcatttttcaaacgaaagggccgatatagaaattaggaggggattggtttgtttaaaaaacttcacatgaagattgctgtttttgtttcgattatgttaatcatcacagttgttcttttaatgctgtcttcttatttgacgctaaaaccgatgattacagaggatgggaaaaatacaactcaaaacgtgacgcagtcacttgaacaaaatattgaattgcaattaaagagttatgccatttcgttatcaagattggctaatggggaattaacgcatacatttgtaacgaaaccaagtaaagaagcttctcggctgtttcacgatgacattaagcaaatcaaagataacgatgattatgttgcgatggcttacataggcaccgcaaaaaaagaaatgtttacatatccaaaagcggatttcgctgaggattacgatccaacatcaagaccatggtataagcttgcagctgaaaccccggatcaagttgtttggacggaaccttataaagatgtcgtgacaggagacatgattgttactgcatcgaaagcgatcttagacgggcaaaaagtgataggggttgccagctatgacttgaaactctctgctatccagagtatggtcaataaacaaaaggtgccttacaatggatttgcctttttagctgatgcgagcggcaatcttttagcccatccgtcaaatcaaggaaaaaatatatcaaaggatcaaacactgcaaaccatcgcatccgagaaaaaagggatacaagatgtgaatgggaaaatggttgtgtaccaaacgattggcgaaacgggctggaaggtcggaacgcagtttgataccgatcaattaatgtggatttcagataaaatgaatcgggcaaatctttggatatcattgattgcgcttatcataacaattattctcagctacttcctggccaaaacgataaccggcccgatacagcagctgatcgcaaaaacgaaagctgtttccgcaggcgatttaacagtgcgcgcggaatcaaaatccaaggatgaagtcggtattttaacaagagactttaatctgatggttgaaaatatgaaggaaatggttgagcaagtcagactctcttcagggaaagtatctgacacctctgaacaattaacggctgtctctgccgaaacaaatgaaacaagcggacaaattgcaaaagcgattgaagaagtagccgcaggggcatcggaacaggcttctgaagttgaaaccattaatgaaaaatcggaaagcctgtcaacgaaaatcaggcaaatcgctgaggaggcaggcggaattaaagaacgatcaaaatcgtccgaggatgcaagctataaaggacttgacgcgctcggccagctgctgatgaaatcaaacgaagccaatatggaaacgaaaaaggttgaaacgatgctgctggatttggaaaatcaaactaagaatattgaagaagtcgttacagcgatttcaaacatatctgatcaaaccaacttgcttgccttaaatgccagtattgaggcagccagagccggagaaagcgggcgcggttttgccgtcgtagccgatgaagtgcggaagttagctgagcaatcagccctttctacaaagcatatcagcgagactgtgaagcttatccagcttgagacaaaagaggcctctcacgcgatggttgaggcaagcagaatgaatgatgaacaaaacagtgccattcacgaaactggagaggtattaaatacgataactgcagaaatgcagtcactggtacaaggtattgatcacatttacgcggaaattcaaagaatgagtgaagaacagcttgcgatatctgaagctattcaaagcatttcagccatatcacaggaatcagctgccgcagcagaggaagtgaacgcatcaaccgatgaacagcttgtcacccttgagaaagtcaaacactcaacggaaacactaaaacatgcaagccaagagcttatgaacacaattgcaaaattcacattgtaatccaattacatccccaaacatcatttgttttggggattttttattttataagatgaatagatatggtagtctagaaaatgaaggaaaaatgataaattttaactaaaatctaaacgaaacatctgggaggaatgaccttgaaaaaaacaattggttttatcggtcttggagtaatgggaaaaagcatggcatcacatattctcaatgacggccaccctgttttggtgtacacccggacaaaagaaaaagcagaaagcatacttcaaaaaggcgcgatctggaaagatacggtcaaagatctttcgaaagaagcggatgttatcatcacaatggtcggctatcccagtgatgttgaagaagtgtatttcggaagcaatggaattattgaaaacgcaaaagaaggcgcatatcttattgatatgacgacatctaagccttcgcttgcgaagaagattgctgaagcggccaaagaaaaagcattgttcgctttagacgctcctgtttccggtggagacgtcggtgcacaaaacggaacactcgcaattatggtcggtggagaaaaagaagcttttgaagcctgcatgccgattttctctttaatgggagagaatattcagtatcaaggaccggctggaagcggacagcataccaagatgtgcaatcagattgcaattgcagccggtatgatcggtgttgctgaagcgatggcttatgcccaaaaatcaggcctagagccggaaaatgttctgaaaagcatcacaacgggcgcagccggaagctggtcattgtcaaatcttgctccccgtatgctgcaaggcaactttgaaccgggattttatgtgaagcattttattaaggatatgggaatcgcactagaggaagcagaattaatgggggaagaaatgccaggcttgtcgctcgcaaaatccttatatgacaagctagctgctcaaggtgaagaaaacagcggaacacagagtatctataagctttgggtgaaataaaaaaagattgcctgtacgaaacaggcaatcttttttttattattttccgatgaattgttgtgtccagatgcttccagactcaacgtagccaacaccgatgtgagtaaagttagggtttagaatgttttttctgtgtccttcactgttcatccaagcttttactacttcttctggtgtcttttggcccttcgcaatgttttcacctgctgttttgtagctgattccgaaagatttcatcatatcaaacggtgagccgtatgttgggctttggtgatcaaagtagtttttgtctttcatatcctgagattttgcgcgtgcggatttgcttaacgtttcatcaatttgaagcggctttaatccttgtttttgtctttctgcatttgtaagttcaacaacttttttctcatatgcacttacagatgaaggtgcagatgttgttgtgtttgttttttcagcagttgcaggtgctttagaagcagtgttttgatcagcagctgctttttcagtagtcttttgtgcaggttttgccgtttctgtcttttgaacatcctgaactttcacgttagattgcttcgcatgtttttgaagaagctgcttcatctctttttcgtttgcagcgtttaacgttttgatatttgtgttaatatgcagctttttcactgcatcgttaagtgacatgttttgtactgtgttccccgtttttactgtaaccacaggctggcaggagagttctttcgctgatgcttgctgtacgcccccgaatgtgaataatccaaccgcagcggcagcagataaaataaatgctttcttcattagttcgtaacctcctagagttgtttgtttctacagaaaaatcataacatagcttttttgtcataaagattccagcactttcctttgacaaatagagattgtcattttcgtaaagtaaatccgttgaatcactaagaataagggaatcagcggtatatatgattttatcgtaccgttacatagcttccttttttttgaaccgttagttatattttaatgtgtttttatattgacagcttttttttactccttttcgctgtaacaactattacaaaggtgttacaattaatctcagtatatgtaaatatattgaacgatttgagaggggtaaccagaagtgactgaaataggacgtgaaccaaagaaaaagagcaaaggaaacagagcaatcagaatgaacctttttttcctagctgtctttgttctattcactgcattaatttttaagctcggggttgttcaaattgttgaaggcgaacagcatgaagaagacgctgagaaatcaaatgcaaaaacagcttactatcctgcgcctcgcgggaagatgtacgacagaaaccagaaagttgctgtcgacaaccagagcgttccagaaattgtgtatgtatcaacatctagcacaaaaacagaagataaaatcaaaacagcgaagcggcttgcttctttcattcatattgataccgaatttttgaaggaaagggatctttgtgattactggatcgcagctcatccgaaaaaagccgccgctctgcttaaggaatcagaaagcaatctgaaaggagaccaagcttacaagcttcaaatagagcgtgttccggatcaagaattaaaggctattcagcaagatgacgaagaaatggaaactgctgcgatatatacaaggttttcaagcggaaatgcttacgaacctcaaatcgtaaaggcaatgaatccaaataagagcaatagcaatggaaaaaacggagcgctgcttgatgagaagaaaaactcctcgcaaagaccaaaaaatgacttaacatatgatgaaatttccattgtttctgagcatttagaagaacttccgggaatcgatatcgtaaacgattggacacgaaaatatccttatgacaaaaccctttattctgttttcgggggcgtcacgacacctgatcagggcctgctgagcgaccggaaagatttctacttaacaagaggctatgcgaataatgacagggtgggaaaaagttatttagagtatcaatatgaagaatatttaaattcgcataaagaaaaagtggaatacgtagaagataataaaggaaatgtcgtcagccaaaaaaccattgataagggcagcaggggatacgatcttcagctttcttttgacatggagcttcaggcaaaggtagaaaagattattgaagaagaagtaagaaacagccgtgcacgcggaaattacatgcttgacagagcctttgccgtaatgatggacccgaataacggcgatattttatcaatggcagggaaaaagatagatttaaaaaccaacaaaattgaagattatgcgataggggcatttaccacccaatatgaaatgggatcagcagtaaagggggccaccgtgctagccggctatcaggacgggatcccgcattataaatattttgttgacatgccactgtattttgcaggaaacggtaataagcctaagaagtcctatatgaatatgggaactattaatgaattaacggcattgcaaaaaagctcaaacgtatacatgtttaatgtcgccatgcacattgccggtgtcacatacaagccgcatggacctcttcctgctgaccagaaggatttaaacaaaatgagaaattactacagccaatttggcctgggagtaaagacaggcatcgatctgccgcaggaatcagccggtatgcaaactacacctgatgcggtaggggggttaattttagacttggccattggacaatacgatacatatacaccgcttcaaatggctcagtacatctcatcaattgccaatggggggtaccgcattcagccaagaattgttacaagtgttcatgagcccagcaaaaaagaaggccttgggaagaccattgaacaaagaaagccaaacattctcaacaaaattaacaactcagaaagtgacattcagcaggtgaagactggaatgaagctagttaccacttcgggaacagctagaaatacgtttgcagaggatgtttccggaaaaacaggaactgctcaaacattttattacggaacaaatcgtaattggtggggaaaaagcacgtacaatctaacatttgtcggctattatccgtcaaaaaatccaaaagtggctttcagtgttgttgttccttctgtagcgaacgaccacgacccgatcaacaaactcattgccaaaagagctatccacgcctacgcagagctcgaaaaaaaacacagtaaaaaataaaaaacagggtgcacaactaaaagattgtgtgccctttcttttattcaaaaattgacgttcaccataagaatagaaggagaatactcattttctagcgaatcatactaggtaaaagtcaatctgtatatgtcgaaacacgatgatcatgcaaaggagggattctgtggaacaggatacgcagcatgttaaaccacttcaaacaaaaaccgatattcatgcagtcttggcctctaatggacgcatcatttatatatctgccaactccaaactgcatttgggctatctccaaggagagatgatcggatcattcctcaaaacgtttctgcatgaggaagaccaatttttggttgaaagctatttttataatgaacatcatctgatgccgtgcacctttcgttttattaaaaaagatcatacgattgtgtgggtggaggctgcggtagaaattgttacgacaagagctgagcggacagaacgggaaatcattttgaaaatgaaggttcttgaagaagaaacaggccatcaatccctaaactgcgaaaaacatgaaatcgaacctgcaagcccggaatcgactacatatataacggatgattatgaacggttggttgaaaatctcccgagtccgctatgcatcagtgtcaaaggcaagatcgtctatgtaaacagcgcgatgctctcaatgctgggagcaaaaagcaaggatgctattattggtaaatggtcctatgaatttattgaagaagaatatcatgatatcgtgaaaaacaggattatacgaatgcaaaaaggaatggaagtcggaatgattgaacagacgtggaaaaggcttgatggcacacctgttcatttagaagtgaaagcatccccgaccgtctacaaaaaccagcaagctgagctgctgctgctgatcgatatctcttcaaggaaaaaattccaaaccatcctgcaaaaaagccgtgaacgatatcagctgctgattcaaaattccattgataccattgcggtgattcacaatggaaaatgggtatttatgaatgagtctggaatttccctgtttgaagcggctacatatgaggatttaattggcaaaaacatatacgatcagctgcatccttgcgatcacgaggatgtaaaagagagaatccaaaacattgccgagcaaaaaacagaatctgaaattgtcaagcaatcctggttcacctttcagaacagggtcatctatacggagatggtctgcattccaacgaccttttttggtgaagcggccgtccaggtcattcttcgggacatctcagagagaaaacaaacagaagaattgatgctgaaatcggaaaaattatcaatcgcagggcagctcgcggcgggaatcgcccatgagatccgcaaccctcttacagcgatcaaaggatttttacagctgatgaaaccgacaatggaaggcaacgaacattactttgatattgtgttttctgaactcagccgtatcgaattaatactcagtgaactgctcatgctggcgaaacctcagcaaaatgctgtcaaagaatatttgaacttgaaaaaattaattggtgaggtttcagccctgttagaaacgcaggcgaatttaaatggcatttttatcagaacaagttatgaaaaagacagcatttatataaacggggatcaaaaccaattaaagcaggtattcattaatttaatcaaaaatgcagttgaatcaatgcctgatgggggaacagtagacattatcataaccgaagatgagcattctgttcatgttactgtcaaagacgaaggggaaggtatacctgaaaaggtactaaaccggattggagagccatttttaacaacaaaagaaaaaggtacggggcttggattaatggtgacatttaatatcattgaaaaccatcagggagttatacatgtggacagccatcctgaaaaaggcacagcgtttaaaatttcatttccaaaaaaataaaacaacggcttaaacgccgttgtttatcgtctgcattgcttcacgtttttttaatacaaataattctaaacggttcaggccttctctcagcgtgtccagcgagtacgcaaaagacaatcttacatatccttcaccatatgttgagaacgagctgcccggcacgagtgccacaccagcgtcttccaaaagagccatactaaaatcaaatgaagtcattccaaatgatttaatagaagggaagatataaaacgcaccggacggtttaactacgtcaagtcccatagaaacaagacggtcataaacatagtcgagacgttttttgtattgttctctcataattagtgcatcgtcaaagccgtttgtgacagcttcaagcgcggctttttgagaaatggatgaggcacatgacacattgtattgatgaacctttaaaatgtgctttgcaatgtctttcggtgcgaataaaaatccaattctccaaccggtcatgctgtgtgattttgacaacccgttaatgacaatcgtttgatcccgcaaataggttgcgatggagtaatgcggtctgtcatatgttaattcactgtatatttcatcagacaatacgaagacatttctgccttttaagagagctgcgatgcttttcagttcttcttcagataaagtcacgccggtaggatttgacggataaggaagcacgacacacttggtgttggatgtcagagcatcttcaatcagccgggcggtaagcttaaagccgtgtgacgtagtatcaacaatgacaggcttggccccgcacaaattgataataggttcatagcctggataaataggtcctggcataatgacttcatcaccgggagataaaatcgtccggaatgcagcatcaagggcttggcttgcgcctgttgtgatgataatttctgattcagcatcatagttgaaatccgcttttttcttcatataaagctgaacagcttgtctcagctccaggtagccggcattcggagtatatgacgtcacgttttcatcaatggctttttttgcggcagctttcacatgatgcggtgtgaaaaaatcaggctggccgattgtaagtgaaatgacgtcttcgtgttgggctacaagattcgagaatttgcgtattcctgaaatttcgatctctcttgctttcggattcagcaaatgttccataattcatcaccttaacaaatataatgagtttatcctattttaccactagctgatcatttgtcacctttttaactgatatatttcgattgtatgcgccttttttctaaacatacctttcttttcagaaaaaaagaagacaaccagcgatttgattgtctttattgtatcatgttctattattgtttatatgtgccaatttcattaatagccataatcaaaatgaaggtcttcgtgccaaattagatacggaggatgctcttcttgaaggtcagctgattctttcttcatattcaggtaagtttcttcactgatatcctctaaaacagtcatttcgttttctttaaatattactaaggtacccattatttacacccttctttggaaaaatccttgactattttatcactgttagttggaaagtcaatggttattaggaaaaaagtttcttttttgaggaacgcggcttgttgccttcggaattcgattttgaagagctgccattcactttttacaaattacgccgatatatacagtacaatactgaatgcgaatagcgagggattgaattgtcgttacaacaatacgaaattttattggattctggtacaaatgaattagaaattgtgaagtttggcgtgggtgaaaatgctttcggaattaacgtcatgaaggtaagagaaattattcagcctgtcgaggtgacatcagtgcctcactcccatcagcatgtagaaggaatgattaaactcagaggagaaatcctccctgtgatcagtctcttctcattttttggagtagagcctgaaggatcaaaagatgagaaatatatcgtgactgaatttaataaacggaaaattgtttttcatgtcggctgtgtttctcaaattcacagagtatcctgggaagcgattgaaaagccgacatcgttaaatcaaggaatggagcggcaccttaccgggattattaagctcgaagacctgatgatctttttgcctgactatgaaaaaattatttatgacattgaatcagattcaggtgtagacacgtataatatgcataccgagggcttcgatgaaagaagaactgataaaaagcttatcattgtagaggactcaccgcttttgatgcgcctcttgcaggatgaactaaaagaagcagggtacaacaatatcgcttcgtttgaaaatggaaaagaggcatatgaatacattatgaaccttgctgaaaacgaaactgatttatcagaacagattgatatgatcatcactgatattgaaatgccaaaaatggacggacacaggctcacaaagctgctgaaggaaaatccgaaaagctcagatgtgccggttatgattttctcatcgttaattacggatgatctgcgtcaccgcggcgaagttgtaggcgcagatgagcaaatcagcaagcctgagatcagtgatttgattaaaaaagtggatacgtatgttattgaataaataaaaacagccgttgccagaaagaggcacggctgtttttattttaaaagtaactctcgccaagttttttaaagaccggtttatggtaagctggctgctggcgatttggcactagcggcttttctttcatgccgacatattcttgcaataggtgtttcgcttttgttaaagacatttgagctttaggatttcggtacgattgattaagtgtacctaaatgcggaagatgttcgaagtcttctttagttggaggcatgtgaaaatagtagtctccgattgagataagcacgtccgattgctgttggctgaaccttggattttttgaaaaatgaagccctattttctttcctttaccttctttgacaagcttttgcaaagcccgttttttcagcagatataggtatttagggttgggggcggtttttgcatggcggttcacagtgtaaactgcttttgaaagattttctacggttggctgcagatctttcgtatatgcatggtcgtccattatttctctcctttgctcttatcaatttctatatgtttagattatacttttttaaagttgaaatgcaaatattgaatgtaaaaatgcgcttttttctaagaaaaaaagcgcatttttaacctgcattatacagatcttgccttctttttcggctgttcttgaaatgcttcctgaacattcacttccacagcctgagcactgtattttggcagtgcaataaaataaaaaataaaaacgagcaggataataacacccatcccgtaataaagataatcaatgtttgaaacaaacttagggaataacagtgcgactaagccgagtgtcaaagactgtgcaaacatcataaaagggtcctgcatgccgcttacacgtcccatcagttttggatgaacaatttttggcatccaccctccgattgcaatgttgatcggtccgatgcacattcccagtgcaaaagctgccgcgtaatacacccataaaatattggtgtagccgaggacgaagatcagcaaacctgcaatgaaaatcggtatcgacattaaaaagtgcggcttcacttttttagagatgatcgtgccgattacgctgcctgccagcagcccaaacccgagtgcgatcgtaaatacagacgtatgccactcataacggtcaggcgccaatccatatttcattgtaaacatcggcaaaacggcgaatcctccattgacaaatccaaaaatgaagaagccaaaaataagagatgccagcaatttgttttttaaaatatagaggatgccttctctaaagtcatttattgaatccttaacagaagtctttctccagctgaatgcaccgtttggctgtcgggcttcttttggaatccggcagctgcggatcagcagcccggaaatgataaagctgacaaaatcaagaataatggcgccttcaataccgatggtgttgtacataaacgcgcctataccgaccccaaacaccataaaaatgctaaaaagcatctgattaagtcctgccgctttcacataatgctccttcggcagaatggcttgtaccaaactgttttctgccggaaagaaaaactttgttacagcgcttctgataaataagatacaaaaaacaagaggaatattgccggtaaataaagtgaaaaaaagcacgacagtcaggcctgctctgatccaatcacaattttctgccaccttttttctgtcaaaccggtccgcgacgactcccacgatcagaaatacaaatatggtcggaagagaatacatcagctccgccaaggtcgtatatgaaggctggctgctgaatcggtccagcaaaaaaaaagcaaaggccatgttgcctactgtcgtgcccatttgagaagcgagtgctgcgaaaaatagacgaacaaaattacgatttttaaatatatccataaaaacgctccttaccctaaaggtcccactttatcatattataaaccgcctgtttttgaaacaaataagaaaacattaccggttaatcgtgactctcgttccgtttggcacaattgaagcaagttcgatcacgtctttgttatgcatgcgaatgcagcctttagaaacagccttaccaatcgaagcgggattattcgtcccatgtattccgtagtgctgctttgaaaggctcagccaataagcgccaaatgggccgccgggattgcgctggcggttaataatgtaaaactcgccagtaggcgtttgcgttagtattttaccaacggcgatgggataggttttcattacccgattatttaggaacagcgtaagggtcttcgctccgattgagactgcgatatgatacggaattgtataagggtccggcagtccggggatgactatggactgtcctgcggtgagccctgcctgcagtgacggattagcctggagtaatgcagccgtgctgattctgaaatcagccgcgatgctgttcagtgtatcaccttgcttcacctggtacgtaagcagtttcctcatcctccttttttacttataagtattgatggggagcccatcctgctacattaatttgctttttaaggtgaagacagtgatttcaggcttggccagaaaccgcaaaggcagcctggtcatcccgaggcctcggtttacgtaaatatgagtgctgcccgtttgatacattccctctgtgtagacttttccatatggaggcgtaataatcggtccgtaaaaaggcagctgaatctggccgccgtgtgtatggccggaaagctgaaggttcacgggataatctgttgttttcaaggccgcatcaggttcatggacgagaagaatggaaaaaagtctgtcgctcagccttgaaagggtgccttcataatctgggtttcccagcattaagtcatcaagcgaagcaatctcgattttgctgccatctgcgagtgacaatgtttgatagccattgcgatataccgtgaaacctccggccgtcatcaggcttttgtaaacggcagttccatagcctccgtgatcatgattgccgtaaatacaaagcttgccgaagggagcattaagctttctcaataatggaatgactgcctggtggtgctgatacgtatcaggattatcaataatatcacctgtaaaaacaatgagatcaggtttagattcattaattgtaagaatgacagtttttaaatcttcgagagtaaagtaatcactcaagtgtgcatcgctgaactgcacgattttaaaaccgtcaaatccgtgcgggatgagagagctttttattgtgtgttcggttgtctcgatcatatgcggctcgagatacctggcatagccatatcccccgccggccgttaaagccccggcagcaagagcgccgaacattccttttagaaattgtcttctggacatctttttcatttcaaaccaacctttaatagagtttttctattatatcatctgtatctgataaaaatctcatatgagcatgtgctgacagaggcagggatataatgatagaatattattgaatgaatactcattcacaattggagggataaacatggaaaaaaaggcggtaattattaccggcgggtcaagcggaatgggaaaagcgatggcaaaaaaacaggctgaattagggtggcacgttatggtgacagggaggaaccatgaagcacttgaggaaacaaaaaaagaaattgagacctttgaggggcaggtcgcttgttttcaaatggatgtccgttccgattccgccgcttcagacatgataaaagaagcgataaaagcctttggccagcttgacgcgctaattaacaacgcggccggaaactttatttgtccggcagaaaagctgacgcccaatggatggaaagccgttattgagattgttttaaacggcacatttttttgcagccaagcagcggcaaggcattggattgaccagaagcagcagggtgtcattttaaatatggcagccacgtacgcttggggagcgggagcgggggtcgttcattccgctgcagccaaagcgggggtattgtcattgacaagaacgctggccgttgaatgggggagcaaatacggcattcgcacaaacgcgatagcccccggaccgattgaacgaacaggcggtgcggagaagctatttgaatcggaaaaagggatggcccgcacgatgaacagtgtgccgctcggccgattgggcacaccggaggaaatcgccgctttggcagcgtttttgctttctgatgaatcatcctatataaacggggattgtatcacaatggacggagggcaatggctgaatccttatccgttttaaagaatattaatctttggattcaatgtggtataatcagacaaagatagagaagcaggtgataacatgttggatccacttgatattttaacgaacattgatgatgtccttccatattaccaggcgatttttagtgccgaggagcagaaggttgtcggatatgaggtgcttggacgaattttggcagattcagaaatccaaagtctcgggcccttctttttagatgcggggatacccgaagaatataaattagaggttgataacagaattatccgccaggctcttgaccgctttttagagtcggattctgatctgctgatttttatgaatcaggatgccaatctgctgatgctggatcatggtgaaagctttctggagcttctgaaagaatatgaagcgaagggaatcgaactccaccgttttgtgcttgaaattacagagcacaattttgaaggggatattgagcagctctaccatatgcttgcatactatcgtacatacggaattaaaatcgcagttgacaacatcggaaaagaaagcagcaacttggacagaatcgcgctgctctcaccagatctgttaaaaatcgatttgcaggcgctgaaagtgtcacagccgtcaccgtcatatgagcatgtgctgtacagcatatctttattagcaagaaaaatcggtgcggcgctgctgtatgaagacattgaggcgaacttccagcttcagtacgcctggagaaacggaggccgctattttcagggctattacttggtgtctccatctgaaacgtttctagagagagatgtattgaaacaaagacttaaaactgaatttcaccaatttatcacacatgagaaaaagaaactggagaccgtctatgagcactctgaacagttttacaaacgagtgcatcaggctgtgacctctttgagaaaaaacaatctgtcttctgatgatgactttattaaaaagctggcggaagagctgacagattgcagcttcaggatttacatgtgtgatgaagaaggcgatcagctgacgggaaatgtgtttaagcaagatggagaatggatttatcagccggaatatgcggaaaagaactggagttggcgcccttattttctggagaacattatgagaatgagaaatctcagaaaaggttttttcagtgatctgtacagtgatttggaaacaggtgaaatgatcagaacgttttcatatccgatggatgatcagatgtatttatttatagacttgccttattcttatttatatgagcaggacggactgatttaacggctgaaaggccgttttttttatgaaatgaaaaaaatatcaaaaaacgattgacattgatactgagaatcattatcatttaattatagagagaagctactctctgttccccaacccctctatcagatcaagatccgaaaaaacttggcgctacccccgccaagttttttatttgtcaaagcataggacaatccaatgaaacaataaacctaactagtggtaaacgtttaacactgggagaaacattcagtgccgaacacccctgacactgctgcacgggtgaggaggaaaattcgttctgaaatgtttatttcagttccgttgtttgcctctatccagcatgactcccattgattatggccacgcgggacttcaccataacattcaaaagaaggttttgacaaagttgcaaaaaggcattcttaatgctgccaaagattcgaaaaaaattataattgtgtgcatgacattcaaaaaaagcctcaaactaaagaaaaatcgtttttttcactttttttctttgcttaaattcagcagtgaaaatgccatcctgtccgactttatggtatgatgctcaatagaacttgtattataataaatacttgttgatttgaagttgctttttgaaaggagtctttttttagaatgtcacaattaatgggtatcatcacacggctgcaaagtctgcaagaaacagcggaagcggctaacgagccaatgcagcgttatttcgaagtgaatggtgagaaaatatgcagtgttaaatatttcgaaaaaaatcaaacgtttgaactgacggttttccaaaagggtgaaaaacctaacacgtatccgtttgataatatcgacatggtttccatcgaaatctttgaacttcttcagtaagattcctgaaatagggggaacaagcttccgcctttgcaaaagtaatcgaaataaacggtaaggaacatacttgtttcatggttgtaaatccttgaaaaggagtgtcgtgatggctgattcttttctgttttataatctttcagaagcacagatgacctttcaagatgtgatggaacggcttaaagcctttgttcaaaaggacccccgttcttcttatgtgttatcgatcggaaccgattcacaggtttaccgcgattacacaaagtttattaccgcattgcatttgcatcgtacaggcaagggagcttggggctgcttaaaaaatcatacagtcgacagacccatacatagccttcgggagaagatttcgttagaaacggcgtacagccaagaaacggccgctcatattcttgatggacacttaatggatattaccgatctgctcctgccctttaccggtgagggggcggatcttacctttgaagttcacttggatattgggaaaaaagggcttacaaaagatctgatccaagaaatgactggacgtattacctccatggggattgaggccaaaataaagccggattcatacactgccttcagctatgcaaatcgtttcacaaaataatttggctgaaaaagccaaggtaaatgtcgaattatgcggttgacgtttgttatctgattacttattctagcggtagagctgaaagtaagttgtcttgctttcagaggtattcagtataaaacagggggcctgattgcgaatgagtcttatcggtgaacgatttacagaagaagaacaaaaacttctgctgaatatcctgatcaaccatgagtatgccatcgagctattaagcagtgagatcaacgatatagagacagggaccaaaaacgttgacggaaccacctacaaaaaacttgtaacgctatacgaccgatttcgatttgaaaattaatgggacaccctataattgatactccacaaagagtatcttttttattgaaaggaaacttttcgacaaatactgataaagtttatattattgcaatatagggaatgtattgatgatgaaaatgaaaaggggtcgaaaacatgataagcttacaatcagatcaacttcttgaggcaacagtcggacaatttatgattgaggcggacaaagtagcgcacgtgcaagtcggaaataaccttgagcacgcattattagtattgacaaaaaccggatacacagccatcccggttctggatccttcctaccgtttacatggcttaatcgggacaaatatgatcatgaacagtatttttggacttgagcgaattgagtttgaaaagcttgaccaaatcactgttgaggaagtcatgctgaccgacattccgcgccttcatatcaatgatccgattatgaagggattcggcatggtcattaataatggatttgtctgtgttgaaaatgacgagcaggtatttgaagggatttttacgagaagagtcgttttaaaggaattgaataagcatatacgctcgttgaataagtaggctgtacggcctatttttattatatagccagagcgaaaaaaagaaagcgcatacataatttaaacgagaatagggcttgaataagaaactaagattttattagaatgggagataagaaaaacttattgataacaaaaaggaggacgacatgcagcttcaagagcttcatatgctcgtagttttagctgaggaattaaatatgagaaaggcggcagaacggctttttgtatctcagccggctttatctcagcgcttacaaaccattgaaaaggcgtggggaacaaaaatctttttaagatcccaaaaaggattaacggtaacgcccgccggtgagaaaatcattcagtttgcgaatgatgtgacattagagcaggaaagaataagagaaaatattgacgagcttgaaggtgaaattcacggcacattgaagcttgccgtcgcctccataatcggtcagcattggctccctaaagtcctgaagacgtatgttgaaaagtatccgaatgcaaagatctcgctcataaccgggtggagcagcgaaatgctgaaaagcttgtatgaggatcaggttcatatcggcattataagaggcaaccctgagtggaaggggcgcaaagattacttaatgacagatcatctgtatttagtggatactgaaatttcctgcatcgaagatattgcccatacagaacggccgtttatccagtttaaaagtgacagcacttattttcaggaaattcagcactggtggcatcaaaaatttaaaacgtcgccgaaacagacgatattggttgatcagattgaaacgtgcaaacagatggcactgcacggaatcggttatgccattttgccgtctgttacccttcaaaatgaagataaagtgaataaaatgcctcttttagacatgaaagggcatccgatcggtcgggatacatggttattaggttatgagcctgcctttgaactgaaacaagttcaagcttttgtacaagtgataaaggatatgctggaccaggaaaatccattttaaagacagcgaggtgctgtctttttttttatttatctgttgacaatgaaaatcattatcatttaaagtgatacatatgatattgaaaatcattatcaattaatggggtgataacatggctaaagccttgattacatatgccagcatgtcaggaaatacagaagacattgccttcataataaaagatacgcttcaggaatatgagttggatatcgattgtgtcgagatagatgatatggatgtgtcttgcttaacctcctatgattatgtactgattggcacctatacatggggggacggcgatttgccctacgaagcggaggattttttcgaagaggtcaaacagcttcagcttcatggtttaaaaacagcctgcttcgggtctggcgattattcttatccaaagttttgcgaagcggtgaatttgttcaatgccatgctgcaagaggcgggagctgctgtttaccaggaaacactaaaaattgaattagcgcctgaaacggatgaagatgtggaaagctgccgagcgtttgcgagaggttttcttgcatgggcagattatatgaacaaggaaaaaagccatgtttcataaaggagcaactgctgttacggcatcggcgttttctggatattttgtggcggtacaaagagaaggcatttttcattattctttggagcagggctggagaaagctttttcgtttgaaaagtaagatacactgtatcagctacatagggccttacttatttggtgttggtgaaaagggaacagtcattcgttcggctgatgaagggaaaacctggacgatgtcgagctttccgacaaatgcaacagtgtgggcgattaccggcagaaacaacgggtttgtctgcgcccacggtaagcattgtatttatgtatcggatgattttggtgtctcatggcgcgtagccaaaccttttgccgaatttcataatccccctgttatccggtcgctatgccttcacgggggcaatctttttattggcacgcaaatacacgcatattttggcggcatttgggcttacgacattaagcgtgacactgtccaaattgtcaaaaaagaaaaaaaacggatgacggcatccatgctcgtgttcaatgaaaattggctggtggcggcgatgggttctgtgaaaggaaagcacggtgctgtcactgtacggaatcttttgaatggtgaagaattcaccatacaatccagtatgatcagaaatgaagaatcatttcttgatctttcagaggatgatggcattatatatgtcactacaacacaagatgaaaatggtttttcgagaatttaccaggttgatctcgaagcccgatcgttaaaatggttcgataccattaaggggcatggatggagagtggccaatcagaaagagaatttcttttgcgcaggcttgtatgaatgtaaatttgtccagccgtacgaagtttcagcaatgattcattagaggaggaacaaggaattggcgaagattttgctcgtttatgcaacaatgtcaggcaacactgaagcaatggcagatttgattgaaaaggggctacaggaggcggaagcagaagtagaccgtttcgaagcaatggatattgatgatgcccagctgtttaccgattatgaccatatcataatgggaacctatacgtggggagacggagatctgcctgatgaatttttagatctggctgaagacatggatgagattgatttttccggcaaaacatgcgctgtatttggttccggtgatacagcatatgaatttttctgcggagcggttgatacgctagaggcaaaaataaaagaacgcggtggagacattgtgctgccttcggtaaaaatcgaaaataatccagaaggtgaagaagaggaagaattaataaacttcgggagacaattcgcaaagaaaagcgggtgcgctgtctgatcactcactgggaactgctaaaacggctgttcctttttttcttgtctttgtatctttcctttgatacagtaatgaggtagaaaatcaggaggaggactatacatatgaaaatgatggacgcaaatgaaattatttcatttattcaaaatagtacaaaatctacacctgtaaaggtttacgtgaaaggtgagctggaaggaatcaatttcggtgaatctgcgaaagcttttatcaacggaaacactggtgtcgttttcggtgaatggagcgaaatccaaacagcaatcgaagaaaaccaaagcaaaatcgaagactatgtggttgaaaatgaccgccgcaattctgcgatcccaatgcttgatcttaaaaacatcaaagcgcgtatcgagccgggcgcgatcatccgcgaccaagttgaaatcggtgataacgcagtcatcatgatgggtgcttctattaatatcggttcagtcatcggcgaaggcacaatgattgatatgaacgttgtgcttggcggacgagctactgtcggaaaaaactgccatatcggcgcgggttctgtacttgcgggcgttattgagccgccatccgctaaaccggttgtgattgaagacgacgtcgtaatcggcgcaaatgctgttgtgcttgaaggtgtaacagtaggtaaaggagctgttgttgctgcgggagcgatcgtggtaaacgacgttgagccatacactgtcgttgcaggcacaccagctaaaaaaatcaaagacattgatgaaaaaacaaaaggcaaaactgaaatcaagcaggaattacgccagctgtaaggaaaagtttgataaaaaaggcgtggataatatatccacgccttattcgtataggcaggaggaatagaaatgaagaaagaggagctcatcgcaattcgcagagatctgcatcgtataccggagcttggatttcaggagttcaaaacccagcagtatttattaaatgtcttggaacaatatccgcaagacagaattgaaattgagaaatggcgaacagggctttttgtaaaagtgaacgggacggcgccggaaaaaatgctggcgtacagagccgatatcgatgcgctttctatagaagagcaaactggtcttccattcgcatcagagcatcacggcaacatgcacgcctgcggtcacgatttgcatatgacgattgcactcggcattattgatcattttgttcaccacccagtcaaacatgatttgctttttctgtttcagccggcagaggaagggcctggcggtgcggaaccaatgcttgagagcgatgtattaaaaaagtggcagcctgatttcatcactgcgcttcatattgctccagagcttccggtaggcaccattgcgacaaaaagcggccttctatttgcgaatacatcagagctagtcatcgatctggaaggcaaagggggacatgcggcatatccgcatttggctgaggatatggttgtagcagcaagtacacttgtcacccagctgcaaacgattatctctagaaacacagatccgctagacagtgctgttattacagttggtaccattaccggaggctcggcacaaaatatcattgcagaaacggcccacctggaaggcacgatccgcacgctttctgaagaatcgatgaaacaagtaaaggaacggattgaagatgtagtgaaaggaatcgaaatcggattccgctgcaaaggaaaagtgacatatccgtctgtatatcaccaagtttacaatacgagcggattaacagaagaatttatgtcttttgttgctgaacatcaactggcgacagtaattgaagcaaaagaagcaatgactggagaggattttggctacatgctgaaaaaatatcccggcttcatgttctggctcggcgctgattctgaacatgggcttcatcatgctaagctgaatcccgatgaaaatgcgatagaaacagcggttaatgtcatgacaggttatttttctgtttatgccaattaagcacaaatgaaagaataaaattccataaaatgagcactctagtaaacggaggtgttcaaaaatggctaaaaaaattggaattgaacaatcgttatcagatgtagaagctgctttaaaagaaaaaggatatgacgttgtaatgatgaaaagccctgctgatgctcaaggctgtgactgctgtgtcgtaacaggtcttgataataatgtgcaagggatagccgatacggtaacacaagcacctgtcattacagcttccgggatgacggctgaagaaatttgcagcgaagttgaaagcagaattcagtaatataaaaaccgaagcaaaaagcttcggttcttttatttattctgtttctttagggaaagcgcggtcgaacgcgttctttatttcttttctcaacactcgttcgactcgccactgttccatattttctgttttggcaatgaccctgattacaatttcggaagtccccagttcttgaatgccgatgacatttgggccttcttttatttgtggaagagccgctgcagtttcatcacaaacctgctgtaaaatatgaatcatttcatcaatatttctttcagccggcactttaatgtcaacaagagcctgcatggtaccacgagaatgattgctcacgtttgtgatgtttctgttggggatgtaatgcagtgttccgtcaaagctgcggatttgagttgtccttaagccaacctgctcgacaattccgtcaaaggtggaaacggtaatataatctccgacatccaattgtttctcaagcaaaataaaaaaacctgtcacgatatcactgacaagcccttgggcgccaaatccgacagccaggccgacgattcctgcccccgctaaaagagcgcttggatcataatgaaacaaatctagaaccatgacgaaaaatatgaaaatcaatgtataagcaaatatgttaagagtcaggcttcggagcgtatgtgcacgtccgatagacaagctattctgctcctcgaattttgcaaacagatgtttaatgattttcatgcctaatgatcgaacgataaaatagagcaatatcataatggcgagtttaatgagcagaacaccggcatttgtaatcagtcccgcccaatcatattgtttaataaagtccatgttgagctccttttctaattgattgctgcacattgagactagttaccctgtacatgaccatgttaaacgttttattcaaaaatgtcgaagccaaagacatacatgatttgttaaaaattgactcaggaaatctgcttttatataatggcattgcaatataactaaaaatggttaatcaccctttattttcatgcgattttgacctttaagccaaacaataaattggagggatacatatggcagaacgtatggtaggtaaacaagctcctcgttttgaaatggaagcagtccttgcaagcaaagaattcggcaaagtaagtcttgaggaaaacatgaaaaacgacaaatggacagtgctgttcttctatccaatggatttcacttttgtttgtccgacagaaattacagcaatgtctgaccgctatgacgagttcgaagatcttgatgcagaagtcatcggggtttcaactgataccatccatactcatttagcttggatcaatacagaccgcaaagaaaacggtcttggccagctgaaatacccgcttgctgctgatacaaaccatgaggtatcccgggaatatggcgttttaatcgaagaagaaggtgtggctttgcgcggattgtttattattaatcctgaaggggagcttcaatatcaaactgttttccataacaatattgggcgtgatgttgatgaaacgcttcgtgttctccaggcgctgcaaactggcggactctgtccggctaactggaaaccaggccaaaaaacactttaattctttccaagaacgaaaagcggtctagcatattcgttaggccactctgttaaataggagggaaaaagcaatgaaattacgtcagtccatgccggaattgacgggagaaaaagcttggttaaatggtgaagtgacgagagagcaattgattggggaaaagccgacgcttattcatttctggtccatcagctgccacttgtgcaaagaagcgatgccgcaagtgaatgaatttcgtgataaatatcaagatcagctgaatgttgtagctgtacacatgccccgttccgaagatgatcttgaccttggtaaaattaaagaaacagctgctgaacacgatatcactcagccgatttttgttgacagtgaccatgctttaaccgatgcatttgaaaatgaatatgtacctgcatattatgtgtttgataaaacaggacagctccgtcacttccaagccggcgggagcggtatgaaaatgcttgaaaaacgtgtgaaccgcgttctggctgaaacggaataggtatctgactaaatagtatttcctaaaaacctgatcacatcaggttttttatttgtgcaaaaagcaatggaagaagagtaagaagcttatttttccaaatttgggtataggaattgatggtttgtttgattgatacgctagaaaacacagctaatttttgatgtttttcctcaattttagataaatctcatatctcataactcgaaaattgtagatattacactaaatttctttaaagaagtaagtaaaatatatattttcaacattataccaaataaactagaaagccccttaatcccttgagaataaaggactcttttgaaaaataaaacattttcagaaaataaggaatttttcatagagtaaatataatagtaaaatgctaaaataatagttgataaaattacttttgtaatctaatatcttaattaaagatgttaattttgatagggggtacattgaggaatgtttaatgaaagagaagctttgcgcttgcggttagaacaattaaatgaagctgaagtgaaagtcattcgtgaatatcaaattgaacgtgataaaatatacgcaaaattaagagagctggacagaaatggaagcccttccgaaatcaaaaaggatttccgttctgaaaaaaaacctgactctctgccggttctcgctgagcttgcggctcaggaaatcagaagctatcagccgcaatcacagcagcagtctgttcagcctcagcttcaatctatttcctctcttcctgccggtataccagacggaacaacacgaagaagaagaggaacggcaagaccgggatcaaaagcagctaagctgcgtgaagctgctattaaaacattaaaacgccacaacgcggcgattaagagctcggagcttcaaaaagagattgaaaaagaaagcggtcttgaaatccctaatatgacaacgtttatgcaaagcttaattaaaatgtacccggaagtgaaaaagccatatcgcgggcagtacattttagagggtgaaatcgaatctgcagaatcagcaaatgaataaatataaagaaaaactgcttggcatcgctcaagcagtttttttattgaggttttttctgtgaaggtttgttttctttttcaagattaagcttatacacccacttttgataaggcttttcttcagcggctctgtttctcagctcttcgattgtatggctcttggcctggtctgatgattgggcgtgggcaagctgtttttggagcacatgtatctgtttggtgacatcttcaaggatggtctctacatgatatggctgcgcgtaggccgctggagcttcttcttccgttttttctttttgtttcgtgccgccatcaatatcggcaaaatgagaagcaatccaggcatcgctttcatcaagctgccgtttatacgatataatagtttcgtgaaataatttttctttcgttttttctatgtctagcagtctttctttcgtttctatgattcgatctttcatatgatcaacttctattttaatatgttttagctgatattctttttctaccatttgctcttttagacgcccgttttcggcttttatcaattcggcttgctgttttgcctgaagcagtgcattttgttcctgctcaatcgaggcttgaagttcgctgatccgtttatgaagatttttattttcttcttcgattttgactttcgcaatatgaagtttatgtttttcttcgatttcggctctgcgtttataggtttcagcagatagaagctcctgcaaaacaacgattttatcaagcagttcagctcttatttggtgcagggtttggctggtgtgggaggcatgtttttcttttgttgacatatgtgttaattcggcagacagctgctggagtttttctttcatatcggtattttctttgagcagtttgttatttttctgatgaaagtagcttgcttcaagttcagaaatcagcttatggcaccttgaaagctcggattttaaataaaggttctcctgagacacgtcgtggaaaaaaggacctgatcttttcattcgaaccatctccctcatgatgttaacactacaatatgcaaatactgaacagctattcctctttaataaacagacaagcagtagcgttgagcctttgcttttgctatgcttttaacgaaactagaggtgagatgatatgaagcatgtaaacgtactgctggcagggggagcctcgcggcgatttggagaaccgaaggcgtttgtcaaatggaagggcaggatgctttacgaatgcgctaaagaggcacttggagaacaaacggttatcatcagccgtcccgaatttattgatagatttcaagaaaacggtgaaaatgaagtgtatcaagatgctgagccatttcaaggcatggggccattggctggtatatataccgcttttaaaaagacagacggtgatctttatactgttctttcctgtgacacaccgctgatacaaagaaggacgatactggagctcaaacgtctgatgactgccggttcggacgcggtagtcccaatttcagacggacaagtgcagccattgattgcgatttaccacaaacgtatcatgccagttctatacgatcagctttctgagaagaggttgagaatatcagatttattaggcagaatttcggtttgttacgtacaggctgaaaatatcggagcaaacccggcagagtttatcaacattaatacacgtgatgattttagctgtttggaagaaaaatcgaactccctcaagcgggactgacggggcaataacatgataagatgacataaaagataaggagaacaggtttgatggaggaacgttattcacggcaaatcagatttaagcaaattggggaagagggtcagaaaagactggcagacagccatgtgctgattgtcggagcgggagcgctcggcactgcaggagctgaagggctttcgagagcgggagtcggtacgattaccattattgaccgtgactatgtggagtggagcaatcttcaaaggcagcagctttatacagaaagcgatgccaaactccgcatgccgaaagccatggctgccaaagagcatctatcagcgattaacagcgagatacatattgaggcgtatgttaccgaaggaacagccgaaacgcttgagccgctgattgaaaaagcagatgtcgtgatcgacgcgacagataattttgaaacccgcatgctgataaacgatcttgcccagaaaacaaagacaccttgggtctatggcgcctgtgtaagcagccagggaatgttcatgactgtcattcccggagaaaccccttgtctgtcttgtttgtttgagcaaattcctgtcggcggggcgacgtgtgatactgccggcattattccgcctgctgtgcatatcgtttcagcatatcagcaggctgaggcatttaagctgttaaccggccaaatagaagcaatacagcggggttttgtgacatttgatgtctggaacaattcgcatatgaagattaacgttaatcatgtacgccgtgaggattgcccatcttgcggagcaaatgcggtatatccttatcttcaggattggaatacaccaaaagctgctgtattatgcggccgtgatacagtgcaggtaaggtcagaatcattaaaaagaatcccgaaacaggaactcattaagcggctgaaaacaatcggcaaggtcgaggctaatgcgtttttgctgcatattttttacgaggatttcagaattgtcattttcaatgacggacgggcactggtgcatggaacaaatgatgtgaaagaagccaactccgtgttggcaagagtgattggactgtaacaacaggaggggtcagaatgctggagaaaagaacaccgataccggtagacgaggcagttcggcgtgtctgccattttcaaaaacaaggtgaaacagaatgggtggcgcttgaagacagccttcatcggtttttagccgaagatataactgcggatcaccacgtacctgcgtttgaccgttcgccatacgatggttttgctgtcagagcgtgcgatacggcagaagcttcacgtgaaaacccagttcggtttgaagttattgaccatattggagcaggagcagtatctgaaaaagaacttggcccgtttcaggccgtgcggattatgactggcgcgcaaatccctgaaggggcagatgcagtcgtcatgattgaactgactcaaacctttgaggagaatgggaagtcatttatgtctttaaaacgccgctttcagacgggggataatatttcaaaaacaggtgaggacgctcaaaaagggagtgttttactgacaaagggcacccgggtgacaccaggagtgacggctcttttggcaacattcggatacgcatctgtgcctgtcgtgagaaagcctgtagtcgggattatcgcaaccggtaccgaattgctgaatgtcagtgatccgctggaaccgggaaaaatccgcaacagcaatgcgagtatggtatatgcgcaagcgatagaagcaggcgcaacaccgctttatttagggaaaatctctgatgaattggataaaagctttgctgcagttaaagaagcgatgaaaaaggtggacttcctgatcacaactggaggtgtgtcagtcggtgactttgactttttgcctgcgatctatgaaaaactcggagcggacgtgctgtttaataaagttgccatgcgcccgggcagcgtgacaacggtggcgcatgcaaacgatatgctgctgtttggcctttcaggtaatccgtcggcatgctatgtcggttttgaactgtttgtcaaaccgataatccagacatggttgctcaatgaaacaccgcattcgatttgtgcggaagctgttttgaccaaggattttccgaagccgaacccatttacccgatttgttcgtgcgctcgtgcaccatcaggaagggaagctgttggcgacacccgttggcttagataagtcgagctctgtcacatcacttgcagatgccaatgcatttattatcctgccgggcggcacgcgaggctacgaatctggcagaacggttcaagtgctgctcatcagagaagagaatggaagtgaatggccttggtccgtcctttcccgatcgtccaagttgtaggatttcaaaacagcgggaaaacaacgtttattgagcgcattcttgaaaaagcctctgaacaaggagtctgtttgggctgcctgaagcatcatggtcacggcggtgaaccgcaagcgctcacggaaggaaaagacacggaccgttacaaggcggcaggtgctgatgtaacagcggtagaaggtgctggtgtgttacagctgactgcccgccgcaattgggatttggcacggctgatcgagttataccaatttctcgaaacagactgtcttctgattgaaggctttaaaaaagccccttatcctaaagtggtaattctaagtgaaaaggaagatctggaagcgctgcaagcagtaaatataatcgccatcatctatagaaaaaaagagcatatgacagagcatcagggattacccgtttttcatgcggatgatccggttgccgtggattttgtgctttcacagctgaagggggaatctgcataatggaacggtttgagattacgaaaacacccattaatactgaagacatcattaaaaaagtggagaaacgggaagcaggagccattacgacatttattggtacggttcgggaatggacaaacggaaaaagaacggttcggcttgaatatgaggcatatgaaccgatggccgtgcaaatgcttgctcaaatcggcgctgaaatcgaagaaaaatgggaaggtgcctcagctgcgatcacgcaccgtataggtgtgctcgatatcggtgaagcagcggtagtgattgctgtatcttctccccatcgaaaagccgcatatgaagccaatgagtatgcgattgaacgcattaaacagattgtgccgatttggaaaaaagaaatttgggaagacggtgagcaatggatcggcgaccagctagaaacaacagcttatccgaacggaaaaccagatctaagcgagggagaccagcatgattaaaattcttttatttgcaggactggctgaacaggccggtacacaagcaatagaaatagatgtggaacaagcaaccacagatgaaataaaagcgagtctaaaagaacaatacggtcttgaatctattgatacgtctatgattgccgttaacgaaagctatgtaaaagaaaatacctctgtatcttcgggtgacacggtagccgtcataccgccggtcagcgggggatgaaaaccggacggcatttcagccgtccggtttttctgtatttcattggcatatccccaagtatcctcagcatacaatgattttctgtaagcgtttattctacatatgttactccctataaagtaagagactcactccataattagactgaaattttgaaaaataatagaaatttatttcgggtatcgatatagtgaagatgataaatgttggaaaggtgctggatatggagacatttaaaagattaaaaatgtattattggccgtacagaaaagtgtttatgtggtcgcttctagccatgcttttgatgactgcaattactgtcgtttatccgattatcctgcaaattacgattgatgagatcgtgctgggacggcagtatcagcttgcggcgtgggtcagcttaggatttattgcggtaatggttttgaaaggaatggctaccttttttcatcagtatttaggtgatatgttcgggatcaaatccgtttatcggctgagaaatggtctgtatgaaaaactgcagcggctttctttttcttactatgataacgcgaaaacaggagatttgatgtccaggctgactgctgatgttgaagggcttcgttttttcttatcatacggtctcgctgagctcattcgcttcggcctgctggtagccatcagcctgtcggttatgttttactattctgttcctctcacgcttgtgacaatagctgttctgccatttctcgcggttgcggtataccggtttgacaaaagagtccatcccgccttcagaggcatccgcaaatcgtttgcgaaactcaatacaaaagttcaggaaaatatcagcggcattaatacggttaaatctctttccagggaagattttcagatcagcactttcaataaagccaatgcagaatacagggcgcagtatttacaaacatcatccatctggtctgcgtatttccctttaatggagttcattggtaacatttgtattgtagctcttctctcatacggcggttacttggttatgcaaaatcagctcaatcccggcgagcttgttgctttcttcagccttgtcaattatatgatgtggcccattatgaacttaggttttgtcatcaatatgttctctcaagcaaaagcgtcaggggaacgcctgctcgacattctggaaaaagaagaagacattacaggtcatcctcatgctttgcataaacaaaaattaaccggagatgtccatttcaaaaatgtttctcttgcatacggaaaagaacaaacaaacgcgctgtgcaatgtaagctttgaggcaaacagcgggaaggtaatcggactgttgggcccgacaggttcaggcaaaagctcagtgacacagcttctcaccagattttacagtcctgttagcggaatgattaccattgatcacaaaccaatcacagattattcgttaaaaacccttcgctccaatatcggggtcgtacttcaagaatccttcctgttttcatctacgattagatcaaatatttcgtatgggcggccggatgcctcaatggaagacgtcattgaagcggcaaaaagggcgcaggctcataactttattatggagcttcctgataggtatgacaccatgctgggagagaggggaatggggctttccggcggacagaaacagcgtattgccattgcgagagccatctgcttgaacccgagcattttaatattggatgatgccacaagcgcagtagatatgcaaacggagcacagcatacagcttgccttaaaagaagtcatgaaaaaccgcacaacctttatcgtcgctcaccgcatttcttcactgaaacacgctgatgaaattctcgtttttaataaaggacgcattcgtgaaaggggaacacatcatgagcttcttgaaaaaggcggctactataaaaagatttacgatttgcaataccgtgatgtcaaaatgattaatgagccgcatgaggtcggatagggaggggccaaatgaaacaagcgaaaaaacaggggattttagagcgtttctattactcttcagatgaaatcattgaaaagccgtttaactgggctcaaatgtggcggctgctgagctatgtcaaaccatatcgaaaaacaattttgccgctttcttttctcaccgtattaattggcactgctgtgaagcttgtgatccccattttgatcggcgtttatgttcttgatcaagcgattacaaggagaaactcggagctgctgattcagctcatttttattattagcggtttatatgtcctcaattacgccgccaatgtgttaagaattaggtggatgaatcagcttggccagcatgtcatttacgatttgcgacagcatttatttacccatgtgcagcgcttatcccatcgattttttgatcagcggtcggcgggatcgatcttagtcaggatcatgaatgatattaactctcttcaggagctctttacaagcggagtcatcaatttgttgaccgacttgctgcttctggccggcgtgattattattttgtttacgctgagccctgagctgactatagccatcatggtgacattgccgattatgttttttatttcaacaagtctcagaaaaaaaatacgccgatcctggcaaacggtacggctgaagcaatcgaagctcaactctcatctaaacgaaagcattcagggcatccgggtcacacaggcatttacgcaggaagaagaaaacatggcgtattttgacggtgtcaatcaggagaactacgaatcatggcgggaagcaactagaaaaaatgccatgttccgtccgcttgtagaaatgacgaatgcgattgggacggctgtcttgatttggtatggagccacactcatcatgaatgaaaccattacgattggcgtcttcgtttcttttgctttctatctgggaatgttttgggaacctatttcgagactgggtcaggtctataatcagctgttaatggggatggcatcatcagaacggatttttgagtttctggacgaacagccaaatgtcaaggagaagccgaatgccattcataatgaaaagataaatggggagatcagttttgaagaggttgaattttcgtatgatgaaaaacgaaaagccctttacgccgtttctttctctattccggcgggctcgacgcttgcgcttgtcgggcatacagggagcgggaagacgacgattgccaatttaatcagccgtttttatgatgcgaccggaggcaccattaaaatagacggtataccgattaaggatctttcccttgccagtctgcgctctcaaatcagcattgtcctgcaagatacatttattttctctgggaccatcatggaaaatattcgttttggaaggccaaatgcttcggatgaagaggtgatgaaagcgtcccaagcggtcggagcggatgagtttatttctgatttagcagaaggatacgcaacagaggtggaggaaagaggcagcgtactgtctgccggtcagcgtcagcttatttcctttgcaagagcattgctcgccgatccggctattatcatccttgacgaagcaacggcaagcattgatacagagacagaagtaaaaattcagcaagcgttaaaaacgcttctgaaagggcgtacagcagtgatgatcgctcacagattgtctacgatccgcgacgccgaccgcatcattgttcttgatcacggcaggaaaatagaagaagggaaccatgatcagctgctcgctaaaggaggcatttatgccgggcttgtgaaagcgcaatacagcacagcgatagaataatatgaaaagccttcaatattgaaggcttttggaaatttattagaaaaacatgaaactttttgatatccttcccgtactatttgttagatattctcaaggaggttttgaaatggaaacgaatgtagaaaaaaacagcggaacggcgactgaaaagccttcacttttaggagtaatcacaagtccgtccgttcaatttgaaagaataagagaaaggccggctgtatggggaccgcttttgattgttgcagcaattatcatcgtcggtgccgtgctgcaatcactcggtacggattatagtgagcttttgaaaagccaggatacgcaagggctatctgctgaacaaatggaaactgtcgcaacaataaccaaagttggcggaatggcaggcgctattatcggcggtatcgcagcattatttattgcccctcttatttattggctctgtgtaaaagtatcaggcggtgttacgacatataaaaaaatgctttctctcggtctgtttgtctctttgattagcagtctcggattattggttaatggaatcgttgcttttacgactgacgtgaatcctctttacagcacgacgtcactggcagggattatcccatctgacggggctcttgccagcgtgttaaatacctttgaaattttcagcatctggagctttgtattattagcaatcggacttcacaaaacgggaggcatctcaaaaaaagccgggtggatttcagcaatcattctattcggaattttagttgtattttcgcttttttcaggtttaatcaattctgtggcgggtgcataagctcatgaaaaaagtctggatcggaattggaatcgcagttatagtcgctctttttgttggaatcaatatataccggtctgccgctccgacaagcggcagcgccggcaaggagatacagacggggagcgttgaagaaaatgaaatctcatcaacggttatggttcctggcacgctaaaattttcaaatgaacagtatgtcttttatgaagcggataaagggacattagaagacattaaagtaaaggaaggcgataaagttaaaaagggcacggctttagtcacctatacaaatgagcagctgagcctggaaaaagaacagaaccagttaacgtctgaatccaaccggcttcaaattgaccaaattcaagaaaagttaaaagccttggacagcaaagaaagagaactggaaaaacaggtaggaaagaaagaagcagaaaaacaaatcgaatctgaacggacagagcttcaaatgcagaaaaaaacagcggagatcgaattaaaacaaaccgagcttcagcggcagtcacttgccaaccgggtgtcagatttagaagtgaaaagcgaaattgaaggcaccgttatttctgtcaaccaagaagcggcatccaaaaagtcagatattcaagagcctgtcatacatatcggcaacccaaaagaccttgtcgtctcagggaaattgtctgaatacgatacattgaaagtcaaaaaaggccagaaggtcacactcacttcagatgtaatacagggtaaaacatggaaaggcacggtttccgcagtcgggcttgttccggatcagcaggagagcgctgcggcacaaggaacagaacaggcggtccaatacccgcttcaagtgaaaataaaaggaaatcttccagaaggaaagccaggctttaaatttatcatgaatattgaaacagataaacggaaagcaaatacgcttccttcaaaggcagtcaaaaaagaagatgaccaatattatgtgtatacagtaaaagacggaaaagcaaagcgagttgatgtcaaaatcggcgaagtgacagatgacctgacagaaattaaagaggggcttacccaagatgatcaagtcattttgaatccatctgatcaggtgactgacggaatggaagtgaaatcctaaatgattcagctttctaatgtgcgaaaaagctaccagatcggaaaggaaacgtttgatgttctccattctattgatttggacattcatcaaggtgaatatgtctcgattatggggccgtcaggatcaggaaaatcgacgatcatgaatattatcggctgtcttgatcggccgacttccggtacatatcaattggacggcgaagacatttcttcatataaagataaagaactggcggcagtccgtaaccggtccatcggttttgtatttcagcaatttcagcttcttccgcggctgaacgcaaaaaaaaatgtcgagctgccgatgatttattccgggataggcaaaaaggaacgtcaagagcgggctgagagagcattggaaaaggtcgggttagccgatcgaatgctccacatgcccaacgagctgtcgggcgggcagaagcagcgggtggcgattgcgagggcgatcgtgaatgagccgaaattgattttagctgatgaaccgaccggcgcgctggatacgaaaacaagcgaggcgattatggatcagtttacagcattaaatgccgagggaacgacaatcgttctggttactcacgagcctgaagtagcagattgcacgaatcggatcgtcatggtgcgtgacggaaacattgttcctgccagctccggacaaaggagtgtgggagaatgagcctgttggaaaacatcagaatggctctaagctctgtccttgcccataaaatgcgttcgatcttaacgatgctcggcattatcattggtgtaggctctgtcattgttgtcgttgcggtaggacagggcggcgagcaaatgctgaagcagtcgatcagcggcccgggaaatactgcggagctgtactatatgcctagcgacgaggagcttgcaagcaacccgaatgccgcagctgaatctacgtttacagaaaacgatattaaaggtttaaaaggaatagaaggcattaaacaagtcgttgcttcgacttctgaaagtatgaaagcgcgttatcacgaagaagaaaccgatgctacggttaacggaataaatgatggatacatgaatgtcaattctttgaaaatcgaaagcggcagaacctttaccgacaatgactttctcgcggggaatagagtcggaatcatctctcaaaaaatggctaaagagctgtttgataaaacctcccctctaggtgaagttgtctggattaacggacagcccgttgaaattatcggcgtgctgaaaaaagtaacaggcttgctttctttcgatttaagtgaaatgtatgtgccatttaatatgatgaaatcctcttttggcacaagtgatttcagtaacgtatcattgcaggtcgaatcagcagacgacataaaatcggctggaaaagaagcggcacagctggtaaatgacaatcatggcacagaggattcgtatcaagtgatgaacatggaggagattgcggccggaattggcaaggtaacggcaattatgacgacgattatcggctcaattgcaggtatttcccttttggtcggcggaatcggtgtcatgaatatcatgctcgtatcagtcacagaacggacacgggaaattggaatcagaaaatccctcggtgcgacgaggggacagattctgactcagtttttaattgagtcagtcgtattgacgctgattggcggtctggtcgggattggtattggatacggaggggccgcgcttgtttcagccattgcgggctggccgtcactcatatcctggcaggttgtatgcgggggcgtgctgttcagtatgctcattggtgttattttcggcatgcttcctgcaaataaagctgcaaagcttgatcccattgaagcgctgcgttatgagtagcctcatgcaacatgcatgaggtttttttatgtttagtgatttctactatgaatataaaagacttttttcattaaaataagaagaaaatgtcgtacaattgtccttatttttgtcgaatttacagtttacaaaccctatagacatacgttaatatggagaaacgtgaaagattttgatagttattgaatgaatttgaatgattttagttgcctaaaccgaaaatagcgtttacaatgaaattgtattcaaaatgaatacgttttcattaggaggtgaagcatgctaactcctgaacggcatcaattgattattgatcaaatagaaaagcatgatgtggtaaagattcaagagcttataaatctgactaatgcttctgaatcaacaatcagaagagatttatcgacccttgaagaacgcggttttttaaagcgcgttcatggtggagcggccaagctttctgatatcagacttgaacccgatatgcttgaaaaatcatccaaaaaccttcacgataaattgaagattgctgaaaaagcagcttctcttttagaagaaggggattgcatttaccttgatgcaggcacgacgacattgcacatgattgattttatggataaaaccaaagatattgtcgttgtcacaaacggggtaatgcatatcgatgcattaataaggaaagaaatttctttttatctgcttggaggatacgtaaagcacagaacgggcgcgattattggaggcgcttcattgattgccatggaccagtacagatttgacaagagttttctggggacaaacggtgtccatacagaggctggatttacaacgccggaccctgatgaggcccttttaaaacagaaagcgatcaaacaggcaaaacacgcttacgtcttagcagacccttcgaagttcggagaaatttcattttcggcattcgccggaataggcgacgcaacaatcattacgactgacgctgaagagcttacattcgataattaccaagaaaaaactgtcgtaaaggtagtgaaaccatgatttacactgtaacacttaatccatctgtcgattatatagttcacgttgaagatttttctgtaggaggcctgaaccgttcttcgtatgataccaagtatccagggggcaaaggcatcaacgtatcgagactgctgaaaagacaccatgtggcgtctaaagcgctcggattcgtcggcggatttaccggagaatatatcaaaacatttttacgggaagaaaacctggaaacagctttttctgaagtaaaaggggatacccgtatcaatgtaaagctgaaaacgggtgatgaaactgaaattaacgggcagggaccgacaatttcggatgaagatttcaaagcctttttagaacagttccaatctttgcaagagggagatatcgttgttcttgcaggaagcattccatcttcactccctcacgatacttatgaaaaaatcgcagaggcctgcaaacagcagaacgcacgagttgttctggatatctcaggcgaggctcttttgaaagcaacagaaatgaaaccatttttgatgaagccaaatcatcatgagcttggagaaatgttcggcacggccattacatctgttgaggaagccgttccttatgggaaaaagcttgtagaacaaggcgctgaacatgtaatcgtatcaatggccggagacggagcgcttctgtttacgaacgaagctgtttattttgctaacgtgccaaaggggaaattggtaaactcagtcggagcaggggattccgttgttgcaggtttccttgccggaatttccaaacagctgccgcttgaagaagcattccgcttaggagttacttcaggcagtgctaccgcgttctctgaagaacttggaacagaagaatttgtccagcagcttcttcctgaagttaaggtcacacgtctatagaggaggaaacacaagtgaaaataactgagcttttaacgaagcatacgataaagcttaatattgagagcaaagaaaaagaaaatgttattgacgaaatggtcactgttcttgataaggcaggaaagttaaatgaccgacaagcctataaagaagccattttaaatcgcgaaagccaaagctccacgggtatcggtgaaggaatcgctatcccccatgcgaaaacggcaagcgttatcaacccggcgatcgcgttcggacgttcaaaagacggcgtcgattatgaatcattagacggccagccggctcacttagtgttcatgatcgcggcgactgaaggcgcaaacaacactcaccttgaagcattgtcaagactttcaacgctgttaatgcgtgaagaaatccgtaagcagctccttgaagctgagtctgaagatgccatcatcgacattattaatcagcacgataaagatgatgacgaagaggaagaggaagaagaagcggcaccagcacctgccggaaaagggaaaattttagcggttactgcatgcccgacaggtattgcccatacattcatggctgcggatgcccttaaagaaaaagcgaaagagcttggtgtggaaattaaggtcgaaacaaatgggtcaagcggcattaagcacaagctcactgcccaagaaatcgaagatgcacctgcaatcattgtcgcagcggacaagcaggttgaaatggaacgttttaaaggcaagcgcgtacttcaagttcctgtaacggcgggtatcagacgtccgcaagagcttatcgaaaaagcgatgaatcaagatgcgccgatttatcaaggcagcggcggcggttcagcagcttcaaacgatgatgaagaagcgaaaggcaagtctggaagcggtatcggaaacacgttttataagcacctgatgagcggtgtcagcaacatgcttccgttcgtagtcggcggcggtattctcgttgcgatttcattcttctggggaattcactctgctgatccgaatgatcctagctacaacacgtttgcagcagcattaaactttatcggcggcgacaatgcattaaaactgattgttgcagttctggccggtttcattgcgatgagtattgcagatcgtcctggttttgcgcctggtatggtcggcggatttatggctactcaagcgaatgctggattcttaggcggcttaattgccggattccttgccggttatgttgtgattttactgaaaaaagtatttacgtttatccctcagtcacttgatggattaaaacctgttttgatttacccgctgttcggtatttttatcactggcgtattaatgcaatttgtcgtcaatacacctgtagcggcatttatgaatttcttaacaaactggcttgaaagccttggtactggaaaccttgtgttaatgggtattatcttgggcggcatgatggcgatcgatatgggtggcccgcttaataaagcagcctttacgttcggtatcgccatgatcgatgcaggcaactatgcgcctcatgcagcaatcatggccggcggtatggttcctccgcttggtatcgcacttgcaacaaccattttcagaaacaaattcactcagcgtgaccgtgaagctggtattacatgctatttcatgggagctgctttcgtaacagagggagcgatcccatttgctgcggctgatccgcttcgcgtcataccagctgctgtagtcggtgcagctgttgccggcggattaactgaattcttccgagtaacgcttccggcgcctcatggaggagtattcgtagctttcattacaaaccatccgatgctttaccttttaagtatcgtgatcggtgctgtcgtgatggcaattatcctcggtatcgtcaaaaaacctgttacagaaaaataagaaaaaaagcgtccttggttcgaaaggacgctttttcttatccggccggcagggagcgcggttaagttatgtattttattcttttttatgataaagtaaaagaagagaaacaactgacatagcaattgtctaggaggaaacactttgaccgaggaaaaaaatacgaatactgagaaaacggcgaagaaaaaaaccaatacgtacctggaatggggtaaagcgattgtcatcgctgttctgctggctctcctgatccgtcactttttgtttgaaccgtatttagttgaaggttcatctatgtatcccacattacatgacggagaaaggctgtttgtgaataaaacagtcaactatatcggcgagctgaagcgcggagatatcgttattatcaacggtgaaacttctaaaatccattatgtaaaaagattgatcggaaagcctggagaaaccgttcaaatgaaggatgacacgctttatataaacggtaaaaaagtagccgagccttacttgtctaaaaacaagaaggaagcagaaaaacttggtgtcagtctgacaggagactttggaccggttaaggttccgaaaggcaaatactttgtcatgggagataaccggctgaattctatggacagccgaaacgggctgggactgatcgcggaagatcgaattgtcggcacatcgaagtttgtctttttcccgtttaacgaaatgcgtcaaacaaaataaaaacgccttgctggcctaggacagcaggcgtttttattttgaaaaagaagcgaccaatgcaatgcataaaaccgtgatgaacactgaaccgataatagctagcacactgaagaaaaggtgaacctgtttgttctcttttccgcgcttttctaaaagccgtttagaaaaaatgtgcgaaaatatgtaaataagggctatgcctatatataagccgatatctttggcggtaaagcctgttacggcaaggtaaaagcccgtaaaaaagatcagtaagcaatattcagtaagtgttaaaagcctcaacgtgttcctccatgagagtgtgtaattttccaggcggatgcattctctctctttaattgtaacacagctggctggtttgggtgtataagtgttttctctctgttttatcagggaatcatttctcttgccctgcattcatggtatacttttattgatgatagacatgatggaggataataaatgattgctgtaaataatgtaagcttgcggtttgcggatcgcaagttatttgaagatgttaatattaaatttaccccaggcaactgctatgggttaattggtgcaaacggtgccggtaaatcaacgtttctaaaggtgctgtcaggcgaaatcgagcctcagacaggcgacgtgcatatgagtcctggcgagcgtcttgccgtcttgaagcagaaccattttgagtacgaagagtatgaagtgctgaaagtggtcattatgggccacaaacgcctgtatgaagtcatgcaggagaaagacgctatttacatgaagcctgatttctcagatgaggatgggattcgtgctgctgagctagaaggtgaattcgcggaactgaacggttgggaagcggaaagtgaagctgcgatcctgttaaaaggccttggtatctcagaagatctgcacacaaaaaagatggcagacctcggcggttcggagaaggtaaaagttctcttggcacaggcattattcggcaagccggatgttctgctcctcgatgagccgacgaaccacttggaccttcaggcaatccagtggcttgaagagtttctgattaactttgaaaacacagttattgtcgtatcccatgaccgccacttcttaaataaagtatgtacgcacattgccgaccttgattttaacaaaattcaaatctatgtcggaaactatgatttctggtacgagtcaagccaactggcgttaaagctttctcaagaagcgaacaagaaaaaagaagagcagattaaacagcttcaagagtttgtcgctagattcagcgccaatgcgtctaaatctaagcaggctacatcaagaaagaaacttctcgaaaaaatcacgctggatgatattaaaccgtcttcccgccgctatccttatgttaacttcacgccggaacgggaaatcggaaatgatgttcttcgcgtggaaggcttaacaaaaacaatcgatggcgtaaaggtgcttgacaatgtcagctttattatgaatcgagaagataaaattgctttcactggccgaaacgaacttgctgttactacgctgtttaaaatcatttccggggaaatggaagctgacagcggaacgtttaaatggggtgttaccacatctcaagcgtattttccaaaagacaacagcgaatatttcgaaggcagtgatctggaccttgtagactggcttcgccaatattctccgcacgaccaaagtgagagctttttacgcggtttcttaggacgcatgctgttctctggagaagaagtccacaaaaaagcaaatgtactttctgggggagaaaaggtccgctgtatgctgtcgaaagcgatgctttctggcgccaatattttaattttggatgagccgactaaccatttagacctagagtccattacagcgctcaataacggcttaatcagctttaaaggcgctatgctgtttacttcccatgaccatcagtttgtgcagaccattgccaacagaattatagaaattacacctaacggcatcgtcgataagcaaatgagctatgacgagttccttgaaaatgctgatgtgcagaaaaaattgactgaactatacgccgaataaaaaagcagagatttttctctgctttttttgatacctaaatgtgaaaggagatcacaacatgaaatttttggttgtcggagcaggtggagtaggcgggtatattggcggacggctttcggagaaaggaaatgatgtgacatttctcgtgcgccaaaaacgagctgagcagcttaaagaaaccgggcttgtcatccatagtgaaaaagggaatgtatcatttcaacccaaactaatcagtgccggagaaacagggcaatttgatgtcgttatcattgcttctaaagcatactcgcttggtcaagtgttagaggatgtcaaaccacttatccatcaggaatctgtcattatccctttcttaaacgggtaccgccaatatgagcagctatttgcggcattttcaaaagaacaggtgctgggcggcctgtgttttatagaaagtgctttagacaacaaaggagaaattcatcatacgagcgcatcgcatcgttttgtatttggagaatggaacggcgagcgtacggagcggataagagcgcttgaagaggcattttcaggtgtgaaggctgaagtcatcattagcgggcatatcgagaaggacatttggaaaaagtatctctttattgcagcgcaagcggggatcacaacgttatttcaacgaccgcttggcccaatcctcgccacagaagccggacgtcacacggcccaaactcttattggggaaatttgcgctgttttacgaaaagaaggcgttccggctgatccggatcttgaggaagagagctttcgtacgatgaccaacatgtcttaccatatgaagtcctccatgcttcgggatatggaaaacggccaaacgactgaaggagaccacctgcatggatttttgcttgaaaaagcaaaacgtttatctctcgcagcaccagtattagaaaccgtttatgcgaatctgcaaatgtatgaagcagaaaaataaaaaaaggaggcggaaaagcctccttttatttacttaaaaagcccaatttccgtttctgaagataggctctcttttcccgtctgccgtaattccgtcaatattcatatccttagaaccgatcataaagtccacgtgtgtaatgctttcatttaggccttctttgacaagctcttcacgagacatctgctttccgccttcaatattaaaggcataggcgcttccgatcgccaaatgatttgacgcgttttcatcaaacagcgtgttatagaaaagaatgtttgattgtgatataggcgaatcgtaaggaacaagtgccacttcacctaaatagtgagaaccttcatctgtttccaccagttcttttaaaatatcctcacctttttcagctttaatgtcgactatacggccattttcaaacgtcagggtgaaattttcaataatatttccgccgtagcttaatggttttgtgcttgataccactccgtcaaccccgtctttttgcggcagcgtgaatacttcttctgtcggcatattggccataaactcatggccgctttcattcacgcttcccgcacctgcccaaacatgcttcctaggcagcttaattgttaaatcagttccttcagcttgataatgtaaggcagcgtaatgtctctcgttcaaatggtcaactttttcatgaagattttggtcatgattgatccacgcctgaaccgggttgtcttcatttacgcgtgtcgctttaaaaatttcttcccacagaaggtggatcgcttcctcctctgatttgccaggaaacaccttgtgagcccagcctgctgatgccgcacctacgacagtccagctgactttgtctgattgaatatattgtctgtatgtatgcaatgctttgcctgctgctttttggaatgccgcaatccgtttggaatctataccttttagcaagtctgggtttgacgacacaacagaaatgaaagcagctccatttttggcaagctcttctctgccttttgcttcccattcaggatattcttcaaatgctttaaacggcgcaagttcgtattttaatttggctacttcgtcatcctgccaattcacggtgacgttttttgcgcccttttcatatgcgtgttttacaattaaacggacaaaatcccgaacgtctgttgaagcatttacgactacatactggcctttttggacattaacgccgacttctaccgccagctgtgcatatgtatttaatttctgtgaaaatgaatccatgaatcattcctccaagcttttttctcatcatatcaaatatgatcctataaaggaaagaaggagcccaaagtgaaaaacccaaaacgacacgtcttgggtttttcaatattatggatgattcagttttacagtgccgcctgcaggcgaatggggcatatttgccaaagaaatgctcatgcctccaagaataattccgcttaaaatggctgcgatcgctactcttcttcctaaatctcttagcatctgtttcctccttaacgtttctccatttcccacaatatgaaggaagtgaggaaaaaagaagcaagaaatttgccgcgtgtgagaattttgcgggtaaagactatttaattgccttttgcagcttatcaatcacttctaaagaacggcctgtgccgattgctacagattcaagcgggttttgcgccacgtgtacaggcacgacaatctcttctgtgagccattctttaattccattaaggagcgcaccgccgcctgttaaaataacgccgcgatcaacaatatctccgctcaattcaggcggacagtcctcaagtgtcgctctgatggcttcaagaatatgcaggagggattcacgcattgcatcttgaatttcgttggattgaagcataatggtttttggaagacctgtcacgaggtcacgtccccgaatttccattgcctctggtatatgttcaatcagagcatggccaattttcatttttacctgctcagctgtgcgttcgccgatcagcaaattgtattttttacggacgaaagaaacgatatcctcatcaagctggtctccgccgatcctgatagaatggcaggaaacaacgccaccgaaggaaataatagcgacctctgtcgtccctccgccgatatctactaccacattggcaaccggctcatcaaccggtaaatccgctccgatggcggctgcaactggctcttcgattaaatgaacgtttttcgcgccgcaatttttcaccgcatcactgatggcgcggcgttctactgctgttgagcctgatggtgtgcaaacgactacgttcggttttctgaacgacatgccgatgctttttgcggcttttttcataatgtgctttagcaggtcagttgtcatatcatagtctgcgatcacgccatctttcatcggtctgacagcgacaatttttcccggtgttttaccgatcatgtttttcgcgtcagctccgattgcaagcactgcttttgtcgtcgtatcgactgcgacaacagatggttcatttaggataatccctttatttttgctgtaaacaagtatattagctgttcctaagtcaatcccgatttcagttgattgaaacatgttttcacccaatctctatcctaatttaatatgattctacatttaaagtttctcagaaatactgcgatttttgggggtgtgtgtcggtaaagaaatgtttttgtaaaaaatcaaggaactgtgtaatagaagtaatacatttttcggttttatggaaaaaatatcttgtaattcttatagaaagcgggaaactttttcaaagtttcattcgtctacgatatattgaggtacatccttaaaacattacatgagaaaagaaacatttaaaggaagaagggtttttatgaaatcaataggtgttgtgagaaaagtagatgaattaggccgcattgtcatgccgattgagttgagacgggcattggatattgccataaaagacagcattgagttttttgttgacggagataaaattatcttgaaaaagtacaaacctcatggcgtttgtttaatgactggagaaatcacttcagaaaataaagaatacggcaacggtaaaattacgctaagccctgagggtgcacagctgcttctcgaagaaattcaagccgctttaaaagaataaaattatgctaaaaaaggcggagcgatatcatctccgccttttttgcgtatcaatttttgattaccgccgcctaagataagacatcaagatatttggtaatgaatgatttgggatactttacatattttactcaattatttgtcgaagaatggtacaataagtagagaaacacaagcggcaggtggtcatatgagaaaatatcaagctcgtatcatttccatcattttggcaatgatttttataatgttttgggattatttattttattttataggcaaaaacccgattaattggcctgttgatattgtgtatactgcagtcacgctggtaagtgtctggatgttggcttattatattgatgagaaacagcagctggttaagaaaatgaaggataacgaatggaagtataaacagctttctgaagaaaaaaaccgcatcatggataatttgcaggaaatcgtatttcaaacgaatgcaaaaggtgaaattacatatttaaaccaagcgtgggcatctataaccgggttttcaatcagtgaatgtatgggaacaatgtataacgattacttcataaaagaaaagcacgtagccgaccacattaacacccaaatccaaaacaaagcgtcttctggcatgtttacggcaaaatacgtgacaaaaaacggcacgattttttggggagaagttcattataaactttactatgaccgggatgaccaatttacaggcagcctgggtacaatgtcagatatcactgagcggaaagaggctgaagatgagctcattgagattaatgaacggctggcgagggaatcccagaaactatcaatcacaagtgaacttgccgcaggtattgctcatgaggtcagaaaccctttaacatctgtcagcggtttcctccagattatgaaaacacaatatccggacagaaaagactattttgacatcatcttttcagagattaaaagaatcgatttagtgctcagcgagctgctgctgcttgcaaaaccgcaggcaatcacatttaaaacacaccagcttaatgagatcttgaaacaagtcacgacattgcttgataccaatgcaattctgtccaatatcgtcatagagaaaaatttcaaagagacagatggctgtatgattaatggagacgaaaatcagctgaagcaggtctttatcaacatcattaaaaacggaattgaggcaatgccaaagggcggtgtcgtcaccatttcaactgctaaaacctcctctcatgcagtgataagcgtaaaggatgaaggaaacggcatgccgcaggaaaagctgaagcagattggcaaacctttttattcaacaaaagaaaagggcactggactgggacttcccatttgtttgagaatcctgaaggaacatgacggggaattgaaaatcgaaagtgaagctggaaaaggcagcgtctttcaagtggttttgcctttaaaatcagacagctgagaggagaaaaataaagtgaactcgcttctgtttgtatatgggacattaagaaagcatgaaaaaaaccatcatttgctggcacaatcggcatgtatcaatgagcaggcgagaacaaagggaagtttgtttgctgcaaaagaggggcccacagttgttttcaatgatgaagatgaaggctatatatatggcgaagtatatgaagcagatgaattgtgtatacataagctcgatcaattttttcaaggatatcataaacaaacggtgtttgtagaaacggatgtcgggattaaaattgcgcttatttattttatgaacaaagacgggtgtgccggttttacgaaaataagcagcggcgactggaaagaacatcagatgatcagcaaatcgaaaaatcccatttattattttgcctatggatcatgcatggataatgcccgctttcaaaaagcgggagtcgatcactattttcaagatccagtaggaagagctgttttaaaaggatacacaacccgcttcacgctaaaaagggaagacggttcaagagcggacatgttggaagacggaggaacaacagaaggcgttttataccgtatcccttattctgctctctcctatctatataaaagggagggcgtcgaatctcttacgtatcggccggcatttgtagacgttgaagctggcggaaggcactacaaagactgtttaacctttctcgtcctccaaaaagaagcggaaattgccccgcctcagcactatcagattgaaatcgaacgcggagcggagctgtatttgtcgcctgagtttactgaaaagctcaagcggcatatgaattcgctgccaaaaggataacactgtaacaaaagaatatgataaaatttgatcaatatcatgtcatataaaggagcactacgatgaaaaaagaatttgcggtaattgggctgggccgttttggtggcagtatttgcaaagcattaagcgaagaaggcgtcgaggttatggcaatggatatcgatgaagataaagtcaacgagtatgccaagattgcatctcacgcagttatcggtgattcgacagacgaatctgtcctgaaaaatttaggcctgcgaaattttgaccacgttattgtagcaatcggggaaaatattcaagcgagtattttaacgacactcattctgaaagaacttggcgtccatacgattacagttaaagcgcagaacgattatcacgaaaaagtgctgtctaaaattggtgcggatcacatcgtccacccggaacgcgatatggcaaaacgaattgcgcataatatcgtgtccaacaatgtacttgactatttggagctgtctgaagagcatagtcttgttgaaatcgtagctaacagccgcctggctggaaatacacttctcgatttagatattcgcgcaaaatacggtattaatatcgtagccataaaaaggggcaaggaagttatcgtatcaccgcttgcaaccgaagtcatccaccaagaagatatactcattgttattggatcagttacagacatctcccgtttcgaaaaaagagttcttcatacaaaatagcagccaaataagccgtcctcaaagggcggtttttcatattatcagaatataacaactttaatgaactgagcgtcaatttcttaaaatttcattgactaagcacaggcgttccgatagcatattgtaccatataataaaaaagaggaggggcctatttgaataaagaagcgctagtcaataggctgaatgcttcagccaaaagacaaaaagctgatatcgtcattaggaacggaaaaatcatggacgtttataatcaagaatggatatatgaagatattgcgattacagatggagttattgtaggcctcggtgagtatgaaggtgaaaataccattgatgcagagggacaaatgattgttccgggttttattgatggacatgtacatattgagtcgtcaatggttacaccgattgagttcgctaaagcagtgttgcctcatggtgtgacgacggttgttacagatccgcatgagatcgcgaatgtgtctggtgaaaaagggattgtgtttatgcttgaacaagctcggcatacaccgctgaatatccattttatgcttccttccagtgtgcctgccgcaagttttgagcgatcaggcgcaattctcaaagctgccgatctcaagcctttttatgaagaagaagaagtattagggctggctgaagttatggattatgtgtcggttcagcaggctgaagaagacatggttcagaaactgctcgatgcccgtgtggcaggaaaacggatagacggtcatttagctggtttatcaacagacctcattaacatttacagaaccgcctttgtcttaaacgaccatgaagtaacatcgaaggaagaagcccttgatcgtatcagaagaggcatgtatgtcatgatgcgtgaaggatcagtcgccaaaaacacgctcaatgtgctgccggcggtgaatgaaaagaacgcacgccggttctttttctgtacggatgataagcatgtggatgatttattgtcagagggaagtgtaaaccatcaggtgaaaatggcgattcaagctggacttgatccgtttttagcctatcaattaggaagcctcaatgcggccgaatgctacggattagatacaaagggagcgattgccccgggttttgacgctgatttgctctttgtatctgatctggaaaatgtcactgtcacaatgacgatggtaaaagggcagactgttgctgaagacagcaaagcggtttatcaggatcatgcttcaactgcagcaccagatcaggcactgcttgattctgttaagcttgctgctcctcttaacaaacaggattttcatatgccaatcgattcagaggagcagatcaatgtcattcaaatcataccaaatcagcttgaaacacgattagtacaagttccggctcctgatgcccgcgaatttgagcctgacactgagtttgatttgttaaagattgcagttgtcgagcggcataaaggattaaaagaaaccggacttggtattgtgaaaggttttggattcaagagcggagcgattgccacaaccatttcacacgactcccataatattattgctgtcggaacgaatgatgaggatatcgcggcggcagttaataagctgcaggaaattggcggaggattaacgattataaaaaatggggaagagctccattcagtaccgctgccgattgcagggttattatccgaccaatctgcagagcaagtgaatcaaagcttgctgacgcttcatgataaattgccgttaatcggtttcacaggcggatttaatccatttttgacattgtcgtttttagcgttgcctgtcattcctgatattaaaatgacgactacgggattattcgatgtaaaatcatttcaacacatatcactgcaataaaaagaggcactccctaagggagtgcctctttttttaaacctccataatgatcggcaggatcattggacggcgctttgttttttcgtacaagaaaggtgcaagcgtgtctgtaatctcatttttgatttcagaccattgagtcgtttttcgttccattactttttgtaagtgatttgaaatgagctcttgagcgtcgttgatcaagtcgccagattctctcatgtacacaaatcctctggaaatcaaatctggacccgctgaaatcttgaagtcgtccatgtcaatgctgacaacaacgatgacaagtccttcttcagagagaattctgcgatcacgaagtacgatattgccaatatcaccgataccgcttccgtcaatgtacactgaaccggacgggatttttcctgcaactgaagcctcatcgcctttaagcgctaatacttcaccattatccatgataaagcagttttcctctgggatgccacaatctgttgcaagcttgacatgcatcttttgcattctgtactcaccgtgaatcggcatgaagaatttaggcttgattaaacgaagcatcagcttctgttcttcctgtccgccgtgaccggatgtatggatatcgttaagagggccgtgaataacctcagcacccgcacgatacagctggttgattgttcgactcacgctgattgtgttgcctgggataggggatgaagaaaatacgaccgtatccccaggattgattgaaatttggcggtgtgtgccgtttgcaattcttgataacgccgccattggttccccttggcttcctgtacataaaattgttactttattagcaggcatacgattgatttcgttatgctcaataaacgtatttttaggacagttaatataaccgagtgtctgtccaatttcgatagccgattccatactgcgtccaaatacggcaacttttcttccattttgtacagcagcttcaattacctgctgcaagcggtgaatattcgacgcaaatgtagcgaagataattcggccgtccaccttgcggaaaatgtcatgaatgctttctcctacacgacgctcagacatggtaaactccggattttcactgtttgtgctgtctgaaagaaggcacaaaacgccttctttaccgatttcggccattttcgttaagtttgccggctcgccgactggagtaaagtcgaatttgaaatccccagtatgtacaatgtttccgggcggcgtttttacaacaatgccgtaggaatccggaatactgtgtgttgttctgaagaatgacacagccgttttgcggaactttacaatatcatcctcgccgataatgttcagtttcgtctgtctcaataatccatgctcttcaagtttattccgaagtaagccgatcgcgagttttccgccgtatacaggaatattcacttgtctgagcaggtatggaataccgccgatgtggtcttcgtgcccgtgggtgataaaaagccctttaattttatcttcgtttttgactaaatacgtataatcagggatgacgtagtcaattccgagcagttcgtcctcgggaaacttgatccccgcatcaatcagtacaatttcatcctggaattgcaccgcgtacgtatttttaccgatttcgcccaaacctccgagggcgaaaacagcagtctgatcattttttacaaatttcataccgctcataactccaatactttaaaattttcgctctgttgttcatattctaagaatgcaccatcaacaggtgtaataaactcaatattaaatttcttttctttcagctttgttctgacgtcacgctcagatacgccttcaatataaagtgaatctgtcttttcccgaacaggtacttcgtcagccttctcttgataaaataccttataaatcattccaaatctctccttaaatgccgtatgttagactcgctcattctattatattcgaaaacggaatataaggaaagccttgagcaaaataaggatctctcaaatagtgaaagatcccttgtcaggcaattgctttcttacggagcattccgttccattgtcttctgagtttctttcttaatttacgcagcattagccagtccctcctttaatgaaaaatttgtcccagagttcttttatacaaatagtatacggagattgaggaagacttttcgtggttattaatggaatttaatatgatttttgaacgaaattgtttgctgaatgacaatctttttgtatgatgagggtgggaattgcagaccaagacgataaaggggaagttgcgatggattctaaattaatcttttttgatattgacggcacaatatatgatcatgataagaatataccggaaagtacgagaaaaaccgtggcggagcttcagcgccaagggcatcatgtgtttattgccagcggccggtctccatttttggttaagccgattttggaggagctgggcatccactcatttatttcctacaatggacagtttgttgtctttgaaaatcaagtgatttataaaaatccgctgcctgaaaatgcaatcaggcgattattaaagcaggcggatgaaggcaagcatcctgttgtgtttatggctgaggacacgatgaaagcgactgttgcggatcacccccatgttctcgagggaatcggcagccttaaaacagattatccagagaccgatgaccttttttatgaaggaaaagaaatttttcagcttcttttattttgtcaggatgaagaagaaaaagcttatgccgcttttcctgagtttgatctagttcgctggcatgagctatcgactgatgttctgccgcacggaggttcgaaggcagaaggaatcaaaaaagtgattgagcgtcttccgtttgatatcggcgatacatatgctttcggcgacggattaaatgatttgcaaatgattgaatacgttgggacaggcgttgctatgggaaatgctgttcccgaactgaaagaaatcgcggactttgtaacaaaaccggtggacgaggatggaattgcatacgctgtcaaagaattgggccttttaaaataaagaaacggctggcattgtgccagccgttttctcttttagcgctcaattgcgattgcattttcaggttctttgaaaggattttccttatcaatatgatcatagaacataacgccgttcaaatgatcgatctcatgctgaaacacaatagccggaaatccttttaaacgaatatcaatattttcgccttctagtgttgttccttttactctgatgcgagcatagcggggaacataaccgggaatcgcttcatccacagagaggcagccctcgccgcttgttaagtagcttttttcaactgaatggctgacgatcttaggattaaacagagcatagctgtataatttaccggaagcatcttccgcatgaacggcgatcattcgttttttgatattaatttgaggagctgcgagtcctacgccagggcgcagcttgtatttttcggctaattctggattttggctgtttttaacaaattcgatcatgtcggccagctgctgtttttctgcatcagttggaggcagctcaacaggttcggcagtctctctgagggctggatggccgtcacgtacgatgttttccatagtaatcaagaaacttcactcctaaagcttaatatgtaaattatatcggatttcttcacaaaggtgcaacgaaacgaatgaccagccgtatatggctggtcaatttcatgctgtgtggttagcaacagcctccacctaaataagcagctccgacaatgattaacagaatgaataaaacaacgattagcgcaaaggtgcggccgtagccatatccgcagccaccatatccgtaaccaccataactgcagcagcctccgccgtaaccatatccatacatattacataacctcctcttttaattacgccagagcctttataagtaggcatagcgtctaatataacctatgtaaaaacaaaaaagttgtatggtcatctgtcctgatttttcacttttttgatttaatttcagtattgcatttatacagcacggctattgccaaatgtccccatggattctatagtagaaattgtcaagattgggggatttaacgtgaaagacgctataaaacggcggcctggaatgaagatcggagctttttgtgccatggcactgatattaacaggatgcatgggacaggacccggttgattcagttcatcattcattagaaaaagccgcggaatcggaaaagccgtttcaagaagaacaaaacacactcaaagaattagaggccaaagaaaatcagctttacgatagtgttatgaagctcaatatggatgattataaaaaaattgttgctttatctaataaggcgcttgaaaatgtcagcaaacgcgaagaacacctagagcttgaaaatgacagcatgaaaaaatcggaaacagaatttgaggaagcaaaaacgtcagcggaacatattaaggaaaaagacataaaagaaaaggccgatgccgcagcaaaccatatggagaaaagatatacatcatatggcactatgtataaagagtataaaaaagcgcttgagcttaataaaaaactgtatatgcagctgaaagacaaagatttgacaagagatgatctggatcagcagatcgataaagtcaatgcttcttatgaaaagatccttaaatatagcggagaatttaatgaacaaaccgaaaaatataataaagcccgggaagatttatatgatgctgcaggctatcgtgtgaaaaagagctgactcgatcagctctttttttgaatgaaatgcgattcggatttcgttcaaaattttcatttctattgtagtacagcatagtaaggtatactagtacagttttgggtgcggttggcatctgtttttttgatgaaaatgtaaagcgaatacatttattgaaaatcagcgatgaaaacgattgacggttcttctttatttggtgtaaactaatccatgttaagcggtgttgtattagttttttacaacttcgaaataatacagttcaaagcagagtgtaactatcctacataaaaggttttggcaaactggggatcggctaaaatataatacgacttactgctgatactttagggtaccctaagtttgtatgtataaaaggaatgcacgtctaatgactgtttaaaagaaaggaagaggtgacttagtatggctgcaaaaacgaaaaaagctatcgttgacagtaagaagcaatttgatgccattaaaaagcagttcgaaacgttccaaattttaaatgaaaagggagaagtcgtgaatgaagcggcgatgcctgatttaactgatgatcaattaaaagagctaatgcgccgcatggtatttacgcgtgtgcttgaccaacgctctatctcattaaaccgtcaaggacgtctcggattttacgctcctactgcgggtcaagaagcttctcagattgcaacgcatttcgcgcttgaaaaagaagactttgttcttcctggataccgtgatgtgcctcagttaatttggcacggccttccattatatcaagcgtttcttttctctcgcggacatttcagaggaaaccaaatgcctgatgatgtgaatgccctttctccacaaatcattatcggtgctcaatacattcaaacggccggtgttgcgctaggtcttaaaaaacgcggtaagaaagctgtcgcaatcacttacactggtgacggcggagcttctcaaggggacttctacgaaggaattaactttgccggagcttataaagcacctgcaatcttcgtggtacaaaacaaccgttacgcgatttcaactcctgttgaaaaacaatctgcagctgaaacaattgcacaaaaagctgtagctgccggtattgtcggcgtacaagtagacggaatggatccgcttgctgtatacgcagcaactgctgaagcacgcgagcgcgcaatcaacggcgaaggtccaacactaattgaaacacttacattccgttatggcccgcacacaatggctggtgacgatcctactaaatatcgtacaaaagaaatcgaaaatgagtgggaacaaaaagatccgcttgtacgcttccgtgcgttccttgaaaacaaaggcttatggtctgaagaagaagaagcaaaagtaattgaggatgcgaaagaagaaattaagcaagcgatcaaaaaagctgatgctgaaccgaagcaaaaagtaactgatttaatgaaaatcatgtacgaaaaaatgcctcacaaccttgaggagcaatttgaaatttatacacagaaggagtcgaagtaagccatggcgcaaatgacaatgattcaagcaatcacggatgcgttacgcacagaactgaaaaatgacgaaaatgtcttagttttcggagaagacgttggtgtaaacggcggcgtattccgtgcgacagaaggattgcaaaaagaattcggtgaagaccgtgtgtttgacacgccacttgctgaatctggtatcggcggtcttgcccttggtttaggcttaaacggcttccgtccggtaatggaaatccaattcttcggatttgtttatgaagtaatggattcagtttctggccaaatggctcgtatgcgctaccgttctggcggacgctggacttcacctgtaacaattcgttctccattcggcggcggtgttcatactcctgaacttcacgctgacagcttggaaggtcttgttgcacaacagcctggtatcaaagttgtgattccatcaactccttacgatgccaaaggacttttaatttctgcgatcagagacaatgatcctgttgtcttcttagagcatatgaagctttaccgttctttccgtcaggaagttcctgaagaagaatacacaattgagcttggaaaagctgacgtgaaacgtgaaggtactgatctttcaatcattacttacggcgcaatggttcatgaatcgttaaaagctgctgaggagcttgaaaaagacggcatttctgctgaagttgtcgaccttcgtacagtaagcccacttgatatcgatacaattatcgcttctgtagaaaaaacaggacgcgcgattgtcgttcaagaggcacaaaaacaagccggtattgctgcaaacgtagtagcagaaattaatgaccgtgcgatcctgagcttggaagcacctgtacttcgcgttgcagcgccagatacagtatttcctttctctcaagcggagagcgtatggcttccaaaccataaagacgttcttgaaacagcaagaaaagtgcttgaattttaatcaaactgcataatcgagagggaagatgaacgttttccctctattatatatctgttttcaatgcttacgatgtaaactttaaaattgcttaatcaaactaggaggtcgagaactgtggcatttgaatttaaacttccagatatcggggaaggtatccacgaaggcgaaatcgtaaaatggtttgtcaagcctaacgacgaggtagacgaagatgatgtactggctgaagtccaaaatgataaagcagtagtagaaattccttcacctgttaaaggaaaagtattagaattaaaagttgaagagggaacggttgcaactgttggacaaacgattattacgtttgatgcacctggttacgaagatcttcaatttaaaggcagcgacgagtctgacgatgcgaaaactgaagcacaagttcagtcaactgcagaagctggacaagacgttgcgaaagaagagcaagctcaagagcctgcaaaagctactggcgcaggacagcaggatcaagctgaagttgacccgaacaaacgcgtgatcgctatgccttccgtacgtaaatatgctcgtgaaaaaggcgtagacatccgtaaggttactggttcaggcaacaacggacgtgttgtaaaagaagatatcgacagctttgtaaacggaggagcgcaagaagctgcaccgcaagaaacagctgcaccacaagaaacagctgctaaaccggctgctgcaccagctccagagggcgaattcccagaaacacgcgaaaaaatgagcggtatccgtaaagcaattgcaaaagcgatggttaactctaaacacactgctcctcacgtaacgttaatggacgaagtggacgtaacaaaccttgttgcacatcgtaaacagttcaaacaggttgctgctgatcaaggaatcaagctgacttacttgccttacgttgtaaaagctcttacatctgcactgaaaaaattccctgttttaaacacgtccattgacgataaaacagatgaagtcatccaaaaacattacttcaacatcggtatcgctgctgacactgaaaaaggcttgcttgtaccggttgtgaaaaatgcagatcgtaaatctgtctttgaaatttctgatgagatcaatggccttgcaacaaaagctcgtgaaggcaagcttgctccagctgaaatgaaaggcgcatcttgcacaattacaaacatcggttctgccggcggacaatggttcactccggttatcaaccatccagaagttgcgattcttggtatcggacgcattgcagaaaaagcgattgttcgtgatggcgaaatcgtagcagctccagtcttagctctctctctcagcttcgaccaccgtatgatcgacggagcaactgcgcaaaatgcattaaatcacatcaagcgtttactgaacgatccacaattaattttaatggaggcgtaatgttatggtagtaggagatttccctattgaaacagatactcttgtaattggtgcgggacctggcggctatgtagctgccatccgcgctgcacagcttggacaaaaagtaacagtcgttgaaaaagcaactcttggaggcgtttgtctgaacgttggatgtatcccttcaaaagcgctgatcaatgcaggtcaccgttatgagaatgcaaaacattctgatgacatgggaatcactgctgagaatgtaacagttgatttcacaaaagttcaagaatggaaagcttctgttgtcaacaagcttactggcggtgtagcaggtcttcttaaaggcaacaaagtagatgttgtaaaaggtgaagcttactttgtagacagcaattcagttcgtgttatggatgagaactctgctcaaacatacacgttcaaaaacgcaatcattgctactggatctcgtcctatcgaattgccaaacttcaaatatagtgagcgtgtcctgaattcaactggcgctttggctcttaaagaaattcctaaaaagctcgttgttatcggcggcggatacatcggaactgaacttggaactgcgtatgctaacttcggtactgaacttgttattcttgaaggcggagatgaaattcttcctggcttcgaaaaacaaatgagttctctcgttacacgcagactgaagaaaaaaggcaacgttgaaatccatacaaacgcgatggctaaaggcgttgaagaaagaccagacggcgtaacagttactttcgaagtaaaaggcgaagaaaaaacggttgatgctgattacgtattgattacagtaggacgccgtccaaacactgatgagcttggtcttgagcaagtcggtatcgaaatgacggaccgcggtatcgtgaaaactgacaaacagtgccgcacaaacgtacctaacatttatgcaatcggtgatatcattgaaggaccgccgcttgctcataaagcatcttacgaaggtaaaatcgcagcagaagctatcgcaggagagcctgcagaaatcgattaccttggtattcctgcggttgttttctctgagcctgaacttgcatcagttggttacactgaagcacaggcgaaagaagaaggtcttgacattgttgctgctaaattcccatttgccgcaaacggccgcgcgctttctcttaacgaaacagacggcttcatgaagctgatcactcgtaaagaggacggtcttgtgatcggtgcacaaatcgccggagcaagtgcttctgatatgatttctgaattaagcttagcgattgaaggcggcatgactgctgaagatatcgcgatgacaattcacgctcacccaacattgggtgaaatcacaatggaagctgctgaagtggcaatcggaagtccgattcacatcgtaaaataattttcatatcaaaaacagccctcgctcaaagcggggctgtttttttattttgacagcacatgctgtaatggtttaatgatgtcttctttctttttcacacatccctcgattttcaccacgacatggcgctgatcaacaaccataagggtagggacagtttcaatctcatcttcccagccttcttttttatcatagaccttcattttatctatttgctcgggataatctttttctaaatcaagcagtgcatcgtaataaggcgcttcctggtctatttggttctcatcagaaaaaaacaggatttgtgtatgatgaatgttgtcaatccggctttttttcatcggattgatggtggaaagcgtacagcccgataaagcaaatactattatcagcatggggaataccgcgcgatatcgcatctatcttctcctctgtataaacagtagttaactagctttagtttatcacgagaggcggcttaatctgcttcttgttacctaattgttatataattgaaaccgtttttaaagtgagattacatattatatcaatcgtttaaaatagcaacctggggtatattgaattttttgctgcattcttggatgaaagttcaagaaaacgtgaaattacattatgtgctgtggcatatatatcgagtaaagcttctgtatgaagaagatattgtatgagggaaaatggaaaagcacggtctatatgatgatctaaaattaaatgtgttatacagtttattgttgacattttaaatgtgacatattaatataataacaacaaaagaaattaagcgttttcaaatttcaaagaaatggggaataagagatgggtacgattgtttgccaagattgcaacgaagccattcattactttgaagatgagaaagtgacaacattatacggaacatgctgcggacaatgtcaatgtcctgttgatgaagagtaaaaaaaagcatgcggctttaagccgcatgctttttattttttattgaattgctttttgttctttgatgacccggatcatatgtaaagtcgagtcctcaggtccttgaacagggaggcctgcgtcaaggtttttaaaaatgtagctgatgttttcttctgtaataatttctcctggaatgaagattggaataccaggcggatataccatgacaaattcagcaataatccgtccggatgcttcttttaatgggatgacttccgtatttgcataaaaagcatcacgcggagtcattgccaataaaggtatttctggaagcagaacctcagtttgctgatgtgttacatcttgttctgacatttgctgtgcgatctcagttaaagcctctacaagccggtctgcatcattttggctgtcaccaggagtgaaaatacacaaaatattgtacagatcagaaagctcaacctcaatattaaaggattcacgaagccatttttccacgtcatgtcctgtcaggccaagacttttcacagagataatcaattttgtcggatcatagctgtaagctgctttcgaaccaagaatctcagaaccgacacaataaatgccttcaatctggttgaggcgatctctcgtctgattggcaagcttgagtgtttcctcagcaagctggtggccttctgttgcaaggcgttttctggcaacatccaaagaagcgagaagcaagtaagaagttgacgtagttgtcagcatgctcaggatggattgcactctgtcttttgatacaaggccctctctcatgtttaaaatcgaactttgcgtcagtgatccgcccagcttgtgtacacttgtcgctgctatgtccgctcctgcctgcatagccgatagcggcaattcgtcgtgaaaatgaatgtgaacgccgtgtgcttcatccacaagcactggcacatcaaacgaatgagcgagttctacgatgctttttaagtcggctgcaacaccgaaatatgtcgggttgatgacgagaagcccttttgcatccgggtgctcggtaagcgcccgtttagcagattcaagtgtaattccgtgggagatgcccaattcattgtcaatttcaggatgaataaaaattggaaccgctccggaaaatacaatagctgtcataattgatttatgaacatttcttggaataataattttatcaccaggtccgcaaacagccattaccattgtcataatggcgccgcttgttccttgaacagaaaaaaatgtatgatccgctccaaatgcttcagcagccaggtcttgtgcttgtttaataatgccttttggcgcgtgcagatcgtctaatggttcaatattaatcaaatctatgcttaacgcgttttcaccgataaattgtctgaattctgggtccattcctgccccttttttatggccgggaatatggaattgaacaggctgtctgcttgcatgctttttcagtcctgtgtataagggtgtttcatgttgcgacaattgttttcccacctttgtaatcatacctatgcataatagtgtgtattaaaatcagtttctcaaccgttttttagacgtaaaacaaatgaattatattatgaacttgaaagaatgtaaagaacaatttatgatcaaatgaagatgctttctcttaagggaagtaaatctacaaggagtgaagaaaatggagtatcaatatccgatgaatgaagattggacaaccgaagaagcagtggatgtgattgcatttttccagcaggttgagcttgcatatgaaaaaggggcggatcgtgaagaactgcttaaagcttaccgccgtttcaaggaaattgtaccggggaaggccgaggaaaaaaagctatgcggcgagtttgaggaacaaagtacatattctccttatcgcacggtcaaacaggcgagagaatctgatcaggcgaagattaagatgtaggaaaaagagctgggggatatcccggctcttttttatgcttgtgatactttttgggtgagacggtacagaaaagcaagctgcttaaaggcatcgtcgatacgctgaaggaattcctggttattcatattcagcacttcttctttttggagctggatgccgcataacagctcggctttctttacagtctgcaaacgctcaaacagtgtcttcagctgttccttgtccatttcagactgtttatgtactcccggttttgtgtgatctgcagaccaaacgaagctgtcagggatatttttcgtaatggtttcttggttcatttcaagcaatttgccgtattcttctttgataggggattcataaataatcgcaaaccacacaaagacgtggctttcccataaaccaatttggaaatgcggcagttttttatagcctcttttgctgtttgcgaacgccacccagctgtcagccgggggattgacggatcttcttgcgtgctttgccacatgcgcaaacatttcatctccggttaaagctgataaagttggggcaaaatgttcgcctagagctgtaagcttcggacggaccgtctcttttaatacttccatgcgcgcgtctaagccttctattgtaaaagtgttaaagtcctcttcagtgaaacgcatttgtgtcatgattttcctccttcatgctaagtatacatattttatcacagttcatacgagcttcaaaaagattgagtgcgtttgaagtaaggggaaatgtggtaataaacgaataggtaaacacacaattttcagaatcatgttgcgcgtaaatagaacaatcatacgatataagaagtaatcattgttgaatggcaaaatgggatgcttttttacaaacaaatgatctctggaaggggcgaaagacaatgaggcaagttgtaaaagagggatttaaggaagagaaaaacaatcgtgttgctgtctggagactagaggttgattatgaattggcaaccctatatgaagcaatgcagaaagaaaatgaagagcagattgaacaaagcaaaaacaaacttgagcgacttagaaaagaatggattcgtcttaacgggtaaaaaagcgatagtgaaaacgaaccgcatgaatggttcgtttttacgtgagaagggatatttttcattttccttgctttttcattgccgttatcagtatcctataaaataaaaggtctacatagaagagaggtacgaacgaatgacaaattggacggaaattgatgagattgcaaagaagtggataagagaagcaggcgcgagaattacacaatccatgcatgaaagcctaacaattgaaacgaaatcaaatccgaatgatttagtcaccaatattgacaaagaaaccgaaaagtttttcattaatcgaattcaagaaacttttccgggacatcggatactcggtgaagaggggcaaggagacaaaatccactcacttgagggagtcgtatggattattgatccgattgatgggacgatgaattttgtgcaccagcaaagaaattttgcgatttccattgggatttttgaaaacggtgaagggaaaatcggtttaatttatgatgtggtgcacgatgagttgtatcacgcatttagcggcagaggagcttatatgaatgaaacgaagctggctccattaaaagaaaccgtcattgaagaagcgatacttgccattaatgcaacatgggtaacggaaaacagaagaattgatcaaagtgtgttagcgccactcgtgaaaagagtcagaggcacacgctcctacggttctgccgctttagagctggcaaatgtcgcggcaggaagaatagatgcttacatcacgatgcggcttgcgccatgggactacgcagccggctgtgtgctgctaaatgaagtaggaggcacctatacgaccattgaaggagagccgtttacctttttagaaaaccacagtgtgctagccggaaacccatctatacataaaacgatatttgaagagtatcttcatgctcggaagtaggccatttgagcaggatgatctcagcttgttagaaaagctcgcagaggctcaacctgtatggaaagaggaggagtttggagataaagatgcagaagactatatcatttcctactccatgtacaacggttcatggcttgtatgggaaaaagacggtatgcctgttgccgtcagctaccatctcgagtggtctccttcaaacggtaagccgtggctcggaacggtcctgattgacccggctgaagaaaaaaagggacatgcgaagatgatcattgaacagatcagcaaattgcttagagccaaacacaaagcgatgtttgcgggagttcccattgagcgcagtgaatggatactgtttttaagccaatgcggctttgaacagctgaaaacggaaaaagatgagaaaggcaaatcatttatgatcttggtgaagcctttagcagaagctgccgtatgataacgacagcttatttgctgcatgcgggttcaataaaaagcctctcaaacattgagaggcttctgatgatttgaaaattatttttttactgcatgaatataatgaatcgtttcaaacgctgacaaattgtcttttcgattactaaagaaaaggtcattgatgtcgtctggtgatagatgttcatagatcagtaaaccagatgactctaacagatgttcaatctcttgataagtgaaacatgatttcatcggttccccgcttgcggcagccatcttcaccatatgttcaactcgatttgacgtcccttttgctgtaaaaagtgtttcgtccgcataatcaaaaacaatagagcttccaggcgggacataagaaaataaattgctgatcaagcttgcattttcttcccgtgttacataataagacactccgagaaggctgaagaatgtttttgtgttcttaaatccttcatctaagagaggatcatacgaaaacgttttggtgaaatccataggaacaaaatgaagatgacccggaattgtcagatttgcatccttcagcttattttttttgaattgctgtgtagccggatggtcaacctcgaaaacctgtaagctgttttctaattctggatgccgaaagcagaaggtatccagccccgctccaagaatgacatactgttttgcccccaggattaattcgttgtgcaagactttttcacaataagaagcacgtgctagtggcgtgggagacagctggatttgtgcaacccattttaatattttttcaggatcattttgaagacgttcggcgatctctttgttgaaaaacgatattccttgaatcatatttttactgatgtcgataaactctttttcgttaatgagatcttttgcgataaaatcatcaaaaataagagatgtgtcatatttgctgtgataagcacgggcaaacgctgaaatcaaagacgttaagctggactcatttttcctcatgaaatgatcctccacaaaaaataagattctcctggccaggagaatcttattatacatacaaatatattaatagtaaattttagcataaataaatttttttgtcaatgtttttgctcttaactggacgcgcgatccttcacatagccacgtgacctgtagcagaattcgtctatcaattatgtggactgaatcattagcttttataaaatgcgtacttgcggctgcatccctctttttgcaaatcaggagcggttttctgtctcatggcagcatcttttcgtcgtttcagctgagagagaaatcaagatatgtaacaataaaagcctgagggatctcaggcttttcctaatattacaatccaacagcattccaggctgcttcaactttagcggcatcagttgagccgtagaggtcacgggcagactgaatgagagctgccttggcatctttgaacgtggaagaaggcgtgaggtacgttgttaacgcacggtaatagatttgctgtgatttagatacaccaagttttgtgatggtgttgtaagcggctttgtttggaattccgctgtttgtgtgtacaccgccataatcgccttcatctgtgtttggaaggtttcggtaattggcgtaattgtcaggctggttgtattttgtagggttggacaggctgcgaagagcaggctggctgaccgtaatgtcttcaccgatgtcccagtcttctgtatcgttaaaatacccgaatacgtcagagaaagactcgtttaatgcacctggctgattttcataaatcaagttggctgtttcttgggtgacgccatgtgtcatttcatgcgctgtcacatctaatgagccggaaagcggagagaagaatgaaccgtcgccatcaccgtaaatcatctggtctcctgtccatgcagcgttattgtattgagtgccatagtgaacggaagaaacgattttactgcctttgttatcatagctgtttcgtttaaagtttgaataaaaataatcgtacactttaccgaggttatagtgtgcgtcaacggctgcccgctgtgatgaagatgtaaatgttttcgttgtgcttgagacaagcgttcccggaaggcggctttgtctgttttgcaaatcatatgtgatgatttgggtgcctgttggttttgaaagatctcttagaacatattttccgccttcataagagatgttcaaaggaacagttgcgccctttagagttgttccgcttccagtggcggcggcatgttctactttattttgctgttttaaaatgctgcctgtttcggcgtcaactaagacttcccagtttgcaggttcaggctcgacatagcgaatcgtcacgtcgtaagcaagacgatagctgccgtcttttgtttctatggctttcaattcggctttattgctgtttttggccgctccgttagaaacagcgtctggtgatttgccgatagctttgaaagcgagtgccagcgctttttcagaagagactttttggctgttatctgtttttgcagcagattgattgtgtaattcaccattgaccgcatagacattatcggatttatcgacgtgaacgatcacttgcgaatctttaattggcactccgttaacgacaggcgcatatcgaaagtgcttgtatccaagggcatcagtcgtgctttcaacaagcttcagccttttggaaggatcacctttaaaaatgttgctgttctttttcaaaaactgcttgacagccttgtcatttggtgcagagagttctgattgcgcaatcgcatttttggagaggaaatttgtttgattctctttaagctgatgaccttcagcagcctgaacacctggcaggctgattgataaactcataaacgaagcagcgacagcaacagacaatttcttacctaaacccacaataaatccccctttttgaaaatactgaaaactttatattgttatattaaactagcattctggaatactcaacaaaaactaacataactagacaaaattgatagtattgtcctgtgtttgtttttgttgaataatatcaagatgagtcaagtgtcatgtggtggttcattcaagagttatgttttttacatatcaaggggaagatgagatatttttgtttcatcttgaaactttttgaaaagtccgctgtctaaccgaatgaggccttaataagaagtaaaggattgttgttcgtgttggagttattcagtcattatgtattgcatttcgaacgttattttatattaagcagacaaagcaccctgctgattcaatggtcaattgttgttctggcgggtttatatcttttggggcatcatcccaaaataaaccggcagcgcacaatgttcatggcgggtgttatattgcggattgtgctgctggcgggagtgtctgttgaacttattcaccaagtgcaatcaacaaacttcaccagcgcttacttaagagaggacggaaatgaactgctgccgctgctgcattttttgttatacggatatgtgctgctaacggcttttcactatatgctgatgccgcgtgatcatggcggaaagggtaagttttatacgttcgaccttgccgttgtcagtttgccaatcgtacaaatgatttttagtttcttttcgtattggaaggaatacccggatgggatggagccgattgcattcgtgtttctgtttttcatcatcactcttcccattgcgttgaatgtagtgtttttcaagctgcattggagaacggataagatcttactaggcttattttatacgctgattatcggactgcttgtcttgctgcttgtgccatatcccaatcaaatctcaaaagattatggtgcagtaatgccatatacgatttatttggcaatggcgggatttttgatgagctatcatctgttccaaaagtcaggaaaggtttatgtgcgtgtgaataagtgggtgacgatggctgtcctggtgttttttgtcctgctgttaaatccgatatataacataggaacggctgctttcgctgtatcaaagccagcaaatgtccatgattcattcaattttgtcggggagcacatttcatcagaaaaagcggaacagatactaaagtcattttttcctacggatgaaacactttatttgcacgatacaaacatggatgtgcattatttctactcatttgaaagcaaaggttacaaagctgaggtagatgaagtatcgcagctgattcgtaattatgaatacttacaaaaagcacatgggaaaaagctaacgaatcaggagtacaagcgaaagtccatcgctttccttgagcgacacggacgtgtgttacataaggatcatatcgaaacaaaggtatctcaagaagacggccagacagtcgtacgtatttacctgaaaaaccagcttcataaaaaagatcatgctgatgatggcgcggtattttattgggaaaaggaaaccttaatggggtttagtgaagatccttcgatttatcagcttgactctcttctgcatgttcatataacggaacaagacattcacgacaaagtggaacaaatgtttacagcgctgaacatatcaaaacagccttatcagatcactgatattgaaagcgacagcctgcttggaagcatggtgagagttgaaacaaaaggtggaattgttttggaatttgagggcgaatcaggttgtttacatagtctttcgcttccgatgaaaaagaatatctcaatggctaacagccggctgcagcatcagatattatcgatcttcgatgctcgtggatcagaaaagaagaaaaaaagcagtcagggtgacatggtgatgtatactgattcttctaaaacatatgagtttgttgaagctcaaggtcagctaaacgtttatgtatacagcgatacacctgatcagtcattcccctatacgtatcgtaatggaacattggcttacgaaaaagtagcttctctatatcaggatgtcatttacaaaaagcgtatgcgtccgattatcgttcaaagaggggatgaacggcattatgcatggctgatcattattcagccgtttggttcaaatcgccatgatgcctatgtagtggatggagaaacacaagaggtgaaaagtctttatgaatcataaagaaaaagagtctgtttttgtagacttatacgacctgtataaagaaggagagctagaggatgaatcaatggaatggatgaaacagcatgaatccctatttcaaaagaatgcggaagacttaaagagtaaaacttgtttaaagagaagtcccggtgctgaagaagaaagccaaatcagatatatgaaagtatacctgtcttccatgtatatctgtttcattttattggccatttggatgacggtgtggttttacttttaatgaagcatagggattccattgaggacttgtatcggcagtattatcaagaaattttaaattatttattcagaaggactcatcatcttgaaacagccaaggacttagcgcaggacacgtttgtgaaagctcttaatggtctggcttcgtttagggggcattcttccatcagaacatggctctacaccattgcgcatcatacctttatcaattggtaccgaagggatgtcaaataccaatttactgaaatcagcaaaaatgaagggttaacgcaaacaacttatgagcagcctgaacagtatctgtcacgaacggtgaaaagcgaaacactgcggcaggagctcctgaagttaaaagatcagcatcaatccgttttgattttaagagaattccaagagctttcttatgaagaaatcgctgagatattgggatggagtctttctaaggtgaaaaccacattgcaccgggctagattagaacttaagaaacacatgacgaaaagtagagaggaggagcggatatgacctgctttctagtaagagacctgcttcctctgtatcttgaaggtgattgtaaaagagaaacggaacacgttatagaagagcatttaaaaatgtgcagcagctgcagagacatgtatgacacgatggctgagccatttgaattggaaagcgaacaggccgttgaggaggcttatctgccggaagaagaactgcgttttaaacagaggtactatggattactgatcatgaaagctgcctgctggtttggagcggtggttgccatgatgctgatcatcaaactgctgatataaaaaaagcgcttgtccgattccggcaagcgcttttttacattaagcctggggatgaatcatatcgtaaatagcggcaagctgttcttgtgacagggcactgaagagtttttcataaacgtcagcttgcagtggcgttgcacctgcttgtagcgctgcgtctttatcatagctgtacacatcatcttgtagcacaatggctgcttgaagaatgtgaatcttgagagaaacagcggagaaaaattgttcaagtgcaagtgcttctttttctgtgaagccaagttcaattgctttttctgtatcaaatttgtaatttccatcctcgagatacacacattgtgaaacaatgctgaaaaattctgatgtcgattcccagagtgtagcaattacctgagcctcttcttttgtcattcctaactcgacagctttttcgctgtcaaaataatatacaccgtcttgttcgtaaatacattgatttaatatatcaatgaatgtattgagatcttcgttagtgctcgcctgatgctggagttgaacagcagtgttatcaaccggtgtttttgcgctggctgcatcagaaccgaacgttaatagagcagctgaggtcattgcggcagtcgttaacatagctttttttacaaatgttttcttcatgtttcttctctcccttttatgaattgtgctacaaattccattatagggagtagtttccggtgaaggaataggcgctatggtattttatgtgtatcgttgccgaactactttttgaaggctgcacgtgtgatcgttagaacgattgtctatgtatgaaggctgttttgcatcttcctgactaagaaacaggggagataaggcttaaagaaatgaaaaacaccgctttctttgcggtgttttttgattacaatgtcgccggcggggcaatgcttttaatcaagcaagccttgttcgcgcattttcttttttaatgtaaatccgccgcccatgacagcgcaaacaagtacaatgctggcgataatgcctgcagggcttttttcagcgataaagacgccgatcagcataatgctgaaaaccgctgcaaatgcaaataatagtaaaagccaattcatttttttcataaattccatccccttttacgtcttatattaagtttacagaaaaacgtgacgcttttaaagaggatgtgtgatataatatgaaagttatctaatttttttaggagatgaaaaagtgaaacttcgaaatgatcttcgcaacatcgcgattattgcccacgttgaccatgggaaaacgactctagtcgatcagcttttacatcaggctggtacgttccgtgccaacgaacaggttgctgaacgcgcaatggactctaatgatcttgaacgcgaacgcggcattacaatattggcgaaaaatactgcgattaactataaagatacacgtatcaatattttggacacccctggacacgcagactttgggggagaagtagaacggattatgaaaatggttgacggcgtagtgcttgtcgttgacgcatatgaaggctgtatgcctcaaactcgttttgttctgaaaaaagctcttgagcaaaacctgaaccctgttgttgttgtaaacaaaattgaccgtgactttgctcgtccagaggaagttatcgatgaagttctggatctgttcattgagcttgatgccaatgaagagcagctcgagttcccagtggtatatgcttccgcgattaatggaacagcgagtcttgatccgaaacaacaggatgaaaacatggaagctttatatgaaaccattattaagcatgttccggcacctgttgataatgcagaggagccgcttcaattccaagttgcccttcttgactacaacgactatgtaggccgtatcggaatcggacgcgtattccgcggcacaatgaaagtcggacagcaggtttctcttatgaagcttgacggaacggcaaagtcattccgtgttacaaagatttttggtttccaaggcttaaagcgtgtggaaattgaagaagcaaaagcgggagacctagttgcggtttccgggatggaagatatcaacgttggtgaaacagtatgtcctgtagaccatcaagatccgcttccggtgcttcgcattgatgagccgacacttcaaatgacatttgtcgtgaataacagtccgtttgcaggccgtgaaggcaaatatgtaacggcccgcaaaatcgaagagcgtcttcaatcacagcttcagacggatgtgagcttgcgtgttgagccaactgcttctcctgatgcttgggttgtttcaggacgcggtgagctgcacttgtcaattttaattgaaaatatgcgtcgtgagggctatgagcttcaagtgtcaaaacctgaagttattatcaaagaaatcgacggcgtacgctgtgagcctgttgaacgtgtgcaaattgatgttcctgaagagcatactggctctgtcatggaatcaatgggtgcccgcaaaggcgaaatggttgatatgatcaacaacggaaacggccaagtccgtctcatctttacagttccttcccgcggattgatcggttactctacagaattcctatcattaacacgcggattcggtattttgaaccatacgtttgacagctaccagccgatgcaggcgggtcaagtcggcggacgccgtcaaggtgtacttgtgtcaatggaaaacggaaaagcaacatcatacggtattcaaggaattgaagaccgcggtgtcatcttcgttgagccgggtactgaagtatacgaaggaatgatcgttggagagcataaccgtgacaatgaccttgttgttaacgtcagcaaaatgaaacagcaaacaaacgtccgttccgcgacaaaggatcagacaactacaattaaaaaagcgcgcatcatgtctcttgaggagtctctagagtacttaaacgaagatgaatattgtgaagtaacacctgaatccatccgtttaagaaagaagatcctcaataagaacgaacgtgaaaaagcagctaaaaagaaaaaaacagcaggattgtcttaatctcgtgcagaatttgaaaagatagaacccgtacgtttacaggggagggaatctttttgaatgacgtaagcgaacgtctgtcgttcttcgccgctctatatcaagtagaccggcagcctgcggcaggcatgtggctgctgtacggcacgatttttgtgttggccgttattgtatttaagcttggatttgctaaacggcttcctgtattaaaatctgcagtggtgtatgtatttttggcgttgggctgcactgttttgacttttttaggggtgtttttgcccgtggcagaaggattggtcgtcgctgcgctgattttaatcacttacaaaatccggctgtatcagtcgaaaaaaggacagtctgcaaaatcataaaagactcagctgaaagctgagtcttttttgtgttctgtatggttaagcggccgctttattttttgactttttcttttttctgctgtcccgggtgaaaagtaaattttcccgttttcagccgttcctctgtttttttggcaatccgatcgtgacattcctggcacatatatgtatggatcgggcggtttcgaagccgtttcgcgatcagggtatcatcatcaattgtttcaattttatcgcaaatagaacatttgaccctcatcatatcacctctttcactaacatgtattatagcacggatcagaagctgtccaaaataagaaaaagctaaagcgcaaggctatagcttagtcattgttgttctttttcatatgatgatcagattgatcgttttgctccttctccatttcctgctgctgttttctatttaattggtcattttgctgctttgtttgcggttcgtcttcattgtcaatcacgtcgttaggcacttcgggaagcactcggccgacaattgcagctaattcatccagtatgcctgttaccggatggccctcgctgatttctctgctcatttcacgaaggcggctgaccgtatcgggatcagcaatgaccactgcgtttgcgccatatcgatcattctttagcgcctgagctacagaatatttaatggtttccactttgcttctgtccaaagtatcatcgacatcaatcccaacaacagcatagcctcccagcacaacggctgttgcatccttgacgtcggggtttttttcagcaacgctgacaagatgcttggcaatatcggttcttgttccattgtcttttgtttcttgagttgtgtcctttacgtgaatcggtttagtctcctgctgtcttgttgattctttttcaacattctgaccctgttttccttgttgataggcacaagcggacaggataagtgtcagctgtatgataatgaaaagaattcgcacttgcgggttccctccttaaaatgctttcattaattttattgttgaattaaccttctatctttatgcacaaaaacatatattttagcaggcattcacctttttcatcaaaagagaagcaggaagaactttgacccttatatcaggaggctgagacttgagtaaaatttatgtgttagatacgaatgtgttgttacaggatcctaacgcaatattttcttttgaagaaaatgaggttgtcatccctgctgtcgttttagaagaggttgattcaaaaaaacggtatatggacgaagttgggaggaatgcaaggcacgtatctaagctaatcgatgcgctaagacaaaagggcaggctgcatgagcatgtaccgcttgacaccggcggcacactgagaattgaactgaatcatcgttcgtttcaccagctgcaagagatctttattgaaaagacgaacgataatcgcatattagccgttgcgaaaaacttaagcctcgaggaagaaaccaaggaaaatggcaggccggttatcctcgtcagtaaggatgtactggtcagggttaaagccgacgcaatcggactgcttgctgaagatttcttgaatgaccgggttgtggacaatgatgaaatgtacagcggctataaagatttatatatcagccagcagctgttcagctctttttacggaaaaaatcaaatttcagtaaacgatgtgaaacagcatgcgttttatccgaatcagtttgctttaatgaaggatgagctaggaggatcctcctcggcagtcggaattgcagataaaaccggaacggtattaaaaagactcgtatttgatgatgaacatatatggggaatcaggccgaaaaatgtacagcagacaatggcattagagcttttgctgcgggaagatattccgcttgtcaccctgatcggcaaagcgggaaccggcaaaacgctcttagctttggcggcagggctattacagacagaagacttgggaatatataaaaagctggtcgtcgcaaggccgattgttcctgttggcaaggacatcgggtatttgccaggcgaaaaagaggaaaagctaaagccttggatgcagccgatttttgacaacttagagtttctgtttaatgcgaaaaaaccgggggagcttgatgctattttggcgggaattggctcaattcaggtagaggcgctgacttatatcagagggagaagcattccagatcaatttattatcattgatgaagcgcaaaatttgaccaggcatgaggtgaaaactttgctgacgagagtcggtgagggcagtaaaattgtcttaatgggtgaccctgaacaaattgatcacccatatttagacagtctgaacaatggtttagcctatgtggttgagcggtttaaaggacaacccatctcaggcagcgtgaagctgttaaaaggtgagagatcaggtctcgcccagctcgcagctgatttgctgtaacattaaatgatttcgatctcttttacgtcggtaatcggctgtttgtgatgaaccgggtcttcaaagtaaatatgcacggggccgccttcttgaatcggcttgcctgcctcactgaaatggacaatactgttcagagcggtttccagagaaacggcggcctttcccgaacttgtgacaaatacacattgcgtcgcagagctgttcggctcagcatttttcaggacagtcccaagtctcattgcgaaactgccgttcatcagtttttgcttctcatattgcttttccgtctttaatgtaggcggcgcaattcgcccctctctgatgacgcgttccggatcaaggtcggattcatccccggctgattgtaaatatatgtcttgactgtcccctttgcggtcaaacgaaaatttgcgatcatcaaaaatccatacgcttggatcaatggtaattgggtatgtaacattgccttttacttggataacgctcatgatatgacccccttctctcaaaattataaaagttttcgcatgaattgtcactttgtgtacaaattatgtgtattgaaatgctgagggaacgagggtgtttgcatggtatgccggcataatgatgagcttgaagccttagtgaaaaaggcgaaaaaagtaacggacaagggggagatagccagctatattcccgccttggcaaaagctgataaacacgacctgtcagtagcgatttattattccaataatgtttgtctgtcagcaggtgacgtagaaaaaacatttacgcttcaaagtatatcgaaagtcctttcccttgctttggtgttaatggaatacggcaaagataaggtcttcagttatgttggacaggagccgaccggtgatccgtttaactcaattatcaagctcgaaacggtgaatccgagcaagccgttaaaccctatgattaatgccggggcattggtagtgacaagtctgataagaggaagaacggtgaaagagagacttgattatttgctttcttttatcagaaggctgacaaacaaccaagagattacatactgccgggaagtggctgaatctgaatacagcacttcaatgattaatcgggcgatgtgttattatatgaagcagtacggcatttttgaagatgatgtagaggcagtaatggatttatacacgaagcaatgcgcgattgagatgaacagcttggatttagcgaaaatcggatctgtatttgcattgaacggcagacatccagagactggggagcaagtcatctcaaaagatgtcgctagaatttgcaaaacatttatggtgacgtgcggaatgtataatgcaagcggggaattcgcaattaaggtcggaattcctgcgaaaagcggcgtatccggcgggattatgggcatttcgccttacgatttcgggatcggcatattcggccccgcattagacgaaaaagggaacagcattgcaggtgtaaagcttttggaaataatgtctgagatgtacaggctgagtattttttaatttatgtcatatgcttaaatcctcttgcattttctgttgataccctttatgataaatagaagaattaggtactcgcctggggaacggagggatacttttggcttcagagatgatagttgaccatcggcaaaaagcttttgaactcttaaaagtggacgctgagaagattttgaagctgatccgagtacaaatggataacttaacgatgcctcaatgtcctctatatgaagaggttttagatactcaaatgttcgggctttcgagggaaatcgattttgctgtccgcctgggattggttgatgaaaaagacggtaaagaccttttatacacattggagcgcgaattgtctgctttgcatgacgcgtttacagctaaataaatgataaaactcaaacttattaacagtttgggtttttttataaccgctatttttctctcatctcataaaagacggtctttttttacacattccttccgaatcgtatagagattcttcgtctcgtttgataaattgtagtaaaataaaaaagataaatacataaaaaccatagataatggaagttagaagcagggaagaggatgttatgttaaaaaaaatgctaaaatcttatgattactcactgatattcgcaatcgttttattatgcggattcggtttagtgatggtatacagctcaagcatgattacggctgtctcccggtatggagtaagcagtaattttttcttcatgcggcagctgtttgctttaattgcgggtggcgctctatttattctcatggcgttgtttccttataaagcactggcccatcaaaagtttcagaaggggatactgcttgtatctgttcttgcgcttatctcactgtttgttttcgggcatgttgccggaaacgcgcagagctggtttaaaatcggcggaatgagtattcagccgggggagtttgtgaaactggtcgtgattttataccttgcagccgtatatgcaaaaaaacaaagttatatcgaccatctgttaacgggagtagcccctccggtagtcatgacgcttgtgatttgcgggttaattgccatgcagcctgatttcggtacagccatgattatagggttaattgcgacgtgcatgatcttgtgctccggtttcagcggaaagacgctggtgaggcttgtgatactgggcggaattgttttcattttagtcagcccgattatctatttgaatcaggacaaaattttaactgaaggccgtttagcgcgttttgagagtcttgaagacccatttaagtatgcaaattcatcaggtttgcaagtgatcaattcttattatgcgatcagctcaggcggcattttcggcctggggctcggtgaaagtatccaaaaatacggatatctgcctgaatcacacactgactttattatggctgtcattgctgaagagctcggcatttttggggtattgtttgtgattttcttattgggttttgtcgtcataaaaggtttttatattgccagaaaatgcgaggacccgtttggaagtcttctggcgatcggcatttcaagcatgattgccatccagtcgtttattaaccttggcggtgtcagcggattaattccgattacaggggttacgctgccatttatcagttacgggggctcttctttggtgctgcttctggggagtatggggatattagcgaatatcagcatgtttgtgaaatattcagagaataagaaaaagaaagagcccttggcgccgaagggaatgaaaaagaaacagctcaaaaaaactgtttatctgtaaaaaacaagtgtgtacaggggaaggatattccgctatgatagattatattccattcgggtaagggggagaaaagtttgtctcagcaatcgatacaaaaagtattagtagcaaacaggggagaaattgcaatccgaatattccgggcgtgtaccgagttgaatattcgtacagttgcggtctattcaaaagaagattccggttcctaccatcggtacaaagcggatgaagcatacttggtcggtgaagggaaaaaaccgattgatgcttacctggatattgaaggtatcattgatattgcgaaaagaaacaaagtcgatgcaattcatccgggatacggtttcttatctgaaaatattcattttgcgagacgatgtgaagaagaaggcatcgtattcatagggccaaaatccgagcatctcgatatgtttggtgacaaggtaaaagcgcgtgagcaggcagaaaaagcgggaatccccgtgattccgggaagcgacggtcctgccgaaacgcttgaagccgtcgaacaatttggacaagctaacggttatccgatcatcattaaagcctcgcttggcggcggcggccgcggtatgcggattgtcagatctgaaagtgaagtcaaagaagcatatgagcgtgctaaatcagaggcgaaagcagcctttggcaatgatgaagtttatgtagaaaaattaattgagaatccgaaacatattgaggttcaggtcattggagacaagcagggaaatgtcgtccatctttttgagagggattgttccgttcaaagacgccatcaaaaggtcattgaagtggcgccgagtgtctcgctgtcacctgaattaagggatcaaatttgtgaggcggcagttgcgcttgctaaaaatgtaaactatataaatgcggggacggtagaattccttgttgcaaacaacgagttctactttattgaagtaaatcctcgcgtacaagttgaacacacgataacagaaatgattactggtgtcgatattgttcaaactcagatccttgttgcccaagggcacagccttcacagcaaaaaagtaaatattcctgagcaaaaggacatttttacaatcggctatgccattcagtcacgggttacgactgaggatccgcaaaatgatttcatgcctgatacaggaaaaatcatggcttaccgctcaggcggcggttttggtgtccgtcttgataccggaaacagcttccagggcgccgtgatcacaccatactatgattcacttctcgttaagctttcaacttgggctttaacgtttgaacaggcagctgccaaaatggtacgaaaccttcaggagtttagaatcagaggcataaaaacgaacattccgttccttgagaacgttgcaaagcatgagaagttcctgacagggcaatatgatacgtctttcattgatacaactcctgaattatttaaattccctaaacaaaaagaccgcggaacgaaaatgctcacttacatcggcaatgtgacagtgaacggcttccccggaatcgggaaaaaagaaaaactggcgtttgacaaaccgttaagcgtaaaggtagacgttgatcagcagcctgccagaggaacaaagcaaattcttgatgaaaaaggtgcagaagggcttgcaaattgggttaaggagcagaaatctgtccttttaactgatacgacattcagagatgcccaccaatcgttattggcaactagaatcagatcgcatgatttgaaaaaaatcgcaaatccgacggctgcgttatggcctgaactattcagtatggaaatgtggggaggcgcgaccttcgatgtagcctaccgattcctgaaagaagatccgtggaagcgtttggaagatcttcgcaaagaagtgccgaataccttattccagatgctgcttcgctcatcaaatgcggtcggctatacgaattatccggacaatgtgattaaagaatttgtgaagcaatcagctcaatccggtattgatgtgtttcgtattttcgacagcttaaactgggtaaaagggatgacgttagccattgatgctgttagggataccggcaaagtggcagaagctgcgatttgttatacgggagatatccttgacaagaaccggacgaagtacgaccttgcatattatacatcgatggcgaaggagcttgaggcggccggagcccatattctcgggattaaagatatggcagggctgttaaaaccgcaggctgcatatgaactcgtttctgcgttgaaagaaacgatcgacattccggttcaccttcatacgcatgatacgagcggaaacggtatttatatgtatgcgaaagctgttgaagccggcgttgatatcatagacgtggcggtcagctcaatggcgggattaacgtcacagcctagcgcgagcggattttatcatgcgatggaaggcaacgaccgccgtccggaaatgaatgtccaaggcgttgaattgctgtcccaatattgggagtcggtgcgtaaatattatagtgaatttgaaagcggaatgaagtctccgcatactgaaatttatgaacacgaaatgccagggggccaatacagcaacctgcagcagcaggccaagggagtaggccttggcgaccgatggaacgaagtcaaggaaatgtacagacgcgtgaacgatatgttcggtgacatcgtcaaggtaacgccttcctcaaaagttgtcggagatatggcactttacatggtgcaaaacaatctgactgaaaaagacgtttacgaaaaaggcgaatctttagatttccctgattctgtcgtggagcttttcaaaggaaatatcggccagcctcatggcggattcccggaaaaactgcaaaagctaatcttaaaagggcaggagccgattacagtcagaccgggcgaactgcttgagccggtgtcatttgaagcgatcaaacaggaatttaaagagcagcataacttggaaatttcagatcaggatgctgtggcatatgccctttatcctaaagtcttcactgattatgtgaaaacgacagaaagctatggagacatctcggtattagatacaccgacattcttctacggcatgacattaggtgaagagatagaagttgaaattgagcgcggcaaaacgctgatcgttaagctgatttcaatcggtgagcctcagcctgatgccacccgcgtcgtttatttcgaactcaacgggcagccgcgtgaagtagtcattaaagatgaaagcattaagtcttccgttcaggaaaggctgaaagcagaccggacaaatccaagccacatcgcagcttccatgcctggaacagttattaaggtattggctgaagcaggcacaaaagtcaataaaggtgatcatttgatgattaatgaagcgatgaaaatggaaacaacggttcaggcgcctttctcaggaacaatcaagcaggttcatgtgaaaaatggtgagccgatccaaacgggagatctgctccttgaaattgaaaaagcataataaacaaagagtgtatatcatttgatatacactcttgtttttttatatagaaaatgtggagtgaaacagatggttagaagagatataaggggacttcagagattatacaatactgtcacaagcccaaaataaatagaggcttatacagccaatattttagatgctttgtagtatgccgtgcatatttctttaagcactatctgatttaaaaggctttaatacttatgttcgcgggctatagatgcatatgaaatttctataatcacgatgagaaaggggacagcccgaagtgagccgctcactgatcatcaagttcagcgaaggctggcgattgaaacaataaagcgccaaaacaagacctgaaaaaagaccaaagccgcctaaggctttggtctttagtccttatgattgactagattcgtaacggaaacgagcaatcaataataagaagtagcatagaacgccaaacagacaggcaataaagaacgagtgggcaagtgcaaagcccagagccagttcagagtatacgatcataatcccggacagtgcctgtaatgtaatgaaaataagacatgagatccatccccaaaagatctgtttttgatctttataggagataatagcatgaacagcggcaacaataatccatacaaataacagtaaggctgctgctctgtggcccatttgcacccattcatggaattgggtcggaagcccattgttcagcgggctgcacagcggcacatcaggacatgccagacttgattcagtgtgtcttacatatgcgcctgtatacacaacgatataggaatatattaaaattcctatcatgtgaaattgcatctttttgccgatttgaagcggcttaaccagtgttctgactgatttatcagcttcaaatatgagcaatgttaaaataagcactgaagcaaaagaaattaatgagatgccgaagtgaagcgccataatcagcgcgttcgaaccgaatacgacagccaatgcgccaagcaatgcctgaagaaataaaaagataattgacatgatcgcgagaaacgttgtttcacgaaaaatcggcgtgatttttctccatgaccaaaacgcaaggcttaacacaaggacaatagagattccgcttgcgaatcggtggctccattcaataattgaagccggattcagttcagggaaaaaacggccgtgacacagcggccactgtctgccgcatccttggccggaacctgtttttgtaacgagggcacccccgattaaaacaattagcatgacaaatgtcgtcagaacaccgagagcttttaatgctttattcatacaatattcaccttcttaacatactgctgcaattttatatacgttccaagtgtaagcgaatatgtgttttgtggcaattcccagagccttttgttcacaaaaatataatagaatgacggcttctggaaaatgtacacttgattattcatgccgggtctgatagaaataaggtaaacgcaatgccgatttggagattgccttcatctttggtaaaattcataaaaagttcacaaataaattcctgtttgtcgtttaatatttaataggatgtttttttacaagatgttatcttgtatgatagagttgcaggttattttattctcctgcgttaggtttgtaagggaggtttacgttatggctaactccagaatcttaaatgatacagctatagacggacaaattgaagaaacaacggcatggaaagattttctgtcccttattaaaatagggatcgtcaattctaacctcatcacgactttcactggaatgtggcttgcactgcatatatccggtttaagttttttaggcaatataaacaccgttcttcttacgttaatcgggtcttcactgattattgcgggctcctgcgcgatcaataactggtatgaccgggacattgaccatcttatggagcgtacgaaagtaagaccgacggttacgggtaaaattcagccgagtcaggcgttatggtctggaattttgctggttgctttaggattgatcatgctgctgatgacaactgtcatggctgctgttatcggttttatcggagtctttacgtatgttgtattgtacacaatgtggacgaaacgccgctatacgattaacacagtagtaggaagcgtttccggtgcagtgccgccgcttattggatggacggcagtggaagggaatatcggtgtcgtagcatgggtgttattcatgattttatttatttggcagattcctcacttcttagcattggctattaagaaaacagaggattacagagctgcaaatattccgatgcttcctgtcgtatacggatttgaagtgacaaaaagacaaattattgtgtgggttgcgtgcctgatgccgcttccgtttttccttggtagcctgggtcttccgattgtcattctcggcttgctgttaaatatcggctggctgattcttggcttaatgggattccgctccaagaatatcatgaagtgggcaacacaaatgttcgtttactcgcttaactacatgacaatctatttcgttgccatggttgtcttgacgcttttctaaaaaatagatatgatgcttgttttatcgcttcaaaataaacgatgacaactagtaaatgccgccttgacctcttgtttaatcaggcggctttacttttatacatagatggcattttgagtaaaaaaactcataatttaagagaagaggaaatgtaagtgctttattggtgataggttggatggcgatagatttcgatccgctttccgcctttgtattgaccagaaaaggggttgggtgaaatggtaaagcattggcgtcttattttattattagccttagtgccgcttctattaagcggatgtggaaaaccttttttatccacgctcaagcctgctggcgaggtggctgataaacagtatgacctgacagtgctcagcacattgattatggtggttgttgttgcagtagtatctgttatcttcttttatgtgattgtgagattcagaagatcacgggtcggtgagaacacgataccgaaacaggtagaggggaataaatttttagaaatcacatggaccgtgatcccgattttgctgctcattattcttgtgattcctgttgtattatatacgctggagctagcggacacatcaccaatggataaaaaaggccgcaaagctgaggatgctcttgtagtcaatgttagggcaaatttatactggtgggagtttgagtaccctgattacggcattatcacaagccaggagctgattgtaccgacagatcagcgtgtatattttaatttaaaagcctctgatgtaaaacattccttctggattccttcagttggaggaaaacttgatacgaatacggataatgaaaataagttcttcctgacatttgattcaaaacgaagcaaagaggcaggagatatgttttttgggaagtgtgcagagctttgcggcccttcacatgcgctgatggattttaaggtgaagacgatgtctgcaaaagaatttcagggctggacaaaagaaatgaagaactataagtctacagcagagagcgatttggctaagcagggtgaagaactgtttaaagagaaaaactgcctgagctgccatgcggtagagccgaatgataagcgtgcagaagccgctagaacggcacctaacttggcgaccttcggtgaaaggacaaaagtggcaggggtgaaagaggccaacaaagaaaatgtgaaggcttggctgaaggaccctgacagtataaagccggggaacaaaatgacaggcacatatccaaagctctcagacagcgaaacagatgcgctttatgaatacttaaaaggcttaaaagcggaaagcaagtagggaagaaagggagatattgggggaggtcacatatgttgaatgcgcttacagaaaagcggacgcgcggatctatgctttgggattatttgacgacggtggaccataaaaaaatcgcgattctttatttagtggcagggggattcttctttcttgtcgggggaattgaagcgatgtttatcagaattcagcttgcaaagccggaaaatgcgtttctcagtgctcaagcgtacaatgaagtaatgactatgcacggaacgacgatgatctttctggctgcgatgccgctcttatttgccttgatgaatgcggttgtgcctttgcagatcggggctcgggacgtttcgtttccatttttaaacgcgcttggtttttggctcttctttttcgggggcattttcttaaatctaagctggtttttgggcggagcgccagatgcgggctggacatcatatgcctcactttcgcttcattctaaagggcacggcatagactttttcgtcctcggactccaaatatcggggctcgggacgctgatagccgggattaactttttggccacgattatcaacatgagggctccgggcatgacgtatatgaggctgcctttgtttacatggacgacatttgtggcctcggcattgattttgttcgcgtttccgccgcttacggttggattggctctcatgatgctggatcggctgttcggaaccaatttctttaatccggagcttggcggaaatacggtcatttgggaacatttattttggatttttggccacccggaggtttatatcctaattttgcctgcattcggtattttttctgaggtcatccctgtgttcgccagaaagcgtttgtttggctattcttcaatggtttttgcaatcgtgctcattggctttctgggctttatggtttgggtgcaccacatgttcacgactggtctcggcccgattgcaaatgcgatttttgcggttgcaacaatggctatcgcgattccgaccgggattaagatttttaactggctgttgacgatttggggaggaaatgtgaagtatacaaccgctatgctgtatgctgtctcatttattccatcctttgtgctcggcggtgtgacgggagtcatgctggcagctgctgcggctgattatcagtttcatgatacgtattttgtggttgcgcacttccactacgtcattattggcggcgttgtattcggccttttagccggtgttcatttctggtggccgaaaatgttcggtaaaattctgcatgaaacgatggggaaaatttcatttgtattgttttttatcggctttcacctcacgtttttcattcagcattttgtcggcttaatggggatgccgcgccgggtttatacgtttttgccaggacagggtctggaaaccggcaacttgatcagtacaatcggggcgttttttatggcggcagctgttattcttctgctggtcaatgtcatatggacatcggtaaaaggtgaatatgtaggtgctgatccatggcatgacggacgtacgctggaatggaccgtttcttcaccgccgccggagtataactttaaacagcttccttttgtcagaggacttgatccgctttggatcgagaagcaggcagggcacaaatcaatgacgccggcggaaccggttgatgatattcatatgccaaacggctcaatcctgccgctcatcatttccttcggcctttttgttgcagcgttcgggctgctgtacagaagtgattacgcttggggtctgccggtgatctttatcgggctcggcatcacatttattacgatgctgcttcgttcagtaattgatgatcacggctatcatattcataaagaggaactgccgaacgatgataaaggggtgaaggcataatgcaagttcaagaaaaattcaccgcagaaacctttccagcttctcctgaaaaagtaaccctggaagggaaaaataaatttttaggcttttggctttttcttggcggagagactgttctgtttgcgtctctcttcgccacgtttcttgcgcttcggaattcaaatgccggtgatccgcctacgacggaaatgttcgatgtgacacttgtattcattgccacaatgcttctattaacgagcagtttaacgagtgtgtacgcgatgtaccacatgaagaacttttccttcggcaagatgcagctttggctgggaattacgattttattgggggcgggctttttaggactggaaatctatgagttcaagcattacacccatgaatttggctttactatcacaagctctgcccttggttctgcgttttacacgcttgtcggtacacacggcgcccacgtggcatttgggcttatgtggatcagcacgcttatgatccgcaatgccaagagagggctgaatctgtatacggcgcctaagttttacgttgccagcctttattggcactttattgatgtcgtgtgggtcttcatctttaccgttgtatatttaatggggatggtgggataaacatggtcgataaaaaaagcagagggcatatcaatagcgaccttgaatttaagaaaaaaaagcatgcccgggagatgaaatatcaagtcctgtcttttggtttaatgatcggtcttacgattgttgcatttctgactgtggccacggacggtgtcggcagctggtttacgattcctttcattattttgctagctgcaattcaagtcatctttcagctgtattatttcatgcatatgaatcagaaagggcatgaggcgccggcactgtttttgtattcaggggtgtttgtcgcgtttatcactgtgcttgcgtttgtgacaattatatggtggtaatttgaacagccgccggaggtgaagaaatgaatcagttggagatatttgggtttcgcgcgatgtggagcccttatcttttttgtatcctgttaggcattacggcgctttatctctatttttacaggcgaatgtcttcaaagccgaatcgaataactggtaaagagatggtgtgctttctgtcggcgatgctgtttttatatgcagccgagggaagcccggttgatctgctcggacatattatgttcagtgcgcatatggtgcagatggccgtcctgtatttggttgtcccgccgcttttgatcgcgggaattcctgcatggctctgggaaaaaatcattttcaggccttcaatcaaaccggttttttcctttttttcgacgcctttaattgctttgcttttgtttaacggcattttttctttatatcatgtaccgcttatatttgatactgtcaaaaccgatccattttaccatacattaatcacttggcttatctttgtgcttgcgttcttcatgtggtggccgcttgttcataaggttgagcgtctacggcagctcagcggcttgatgaagctgggttatattatggcggacggtatgctactcacacctgcttgcgccttgatcatgttcagcggtgcaccgttatacgccacctatacagatccggctttatgggctgaggcaatgaggctttgcgtgccagcggatatgatggggcaggtcccattaacagggccagagatgttgaatacactgcctttgttagaggatcagcagctcggagcagtcatgatgaaaatcattcaggaaattgtgtacggtacttttttggccgttatttttttccaatgggtgaagaaagaaagggaaaaggacgggcaggaggagccgccgtatattcagcagacgatatcataaaaggtacagcgaaatatgctgtaccttttcgttacatttgaactgtttttaacatgttggctatgtcctgaatcagtgccttgctttttgtcacaacctgtacgggaaactcttccgtttctccatattctactccatgcgggtagtaatgctttcctaggagaggggacattaattgaatcacggcgcgcccgcttccgacatcgccttctgccgcaataccttgtatccgcaggtaaaacgtaccctcaatcgtcgaaaacttcttgtcataggtgactctctcgtaatcccattgacccgctctaatgagacctttgctttccattaagtcgtctagccagctgagctcagccttaaccccttcaagtccgctttcagtaaacttcaacactgacccctccttataaaaattacctttcctgacaatcatagtatgaaagcgttaaactttcaatgaatcttcttcttttgaaagtatgcaaaaattaaattttgacgacaatagcactagactaaaggaggttaaacggatgacaaaaataaaagatctgatgacagccgacttgcaatattgcacggtattagataatgtatatgaagctgcagtaaagatgaaggacgcaaatgtaggagcgattccggtagttgatgaggacggggaaacattggtcggcatcgtaaccgaccgcgatctcgtattaagaggaatcgccatcaaaaaaccgaactcgcaaaaaatcactgacgcgatgactgaaaaacctgtcagtgtggaggaagatgcttcagtcgatgaggttcttcatttgatggcatcgcatcagctcagaaggataccagttacaaaaaataaaaaactgactggaattgtcacgcttggtgatctttctttatctgagcaaacgaatgaacgtgccggcagcgccttatcggatatttccgaaggtgataatagagaagaaggcttttttcattaacacataaatctttgacatgttaaataggctgtattgtaatgggatgtaaacaagagattgtgaatcgccacgggggtgatagattgaaaaatatattgagagcaatggttatccttttgattatctgcggaacttatgttctgtttattcaatatggatctgttcctgaaaagaaatcaaatgacagcgagcctcaggtgtcgaatgaggaagcgcaaagcggcaaacgaatacatatgccgacttcagggttattgtccttcatgggcaagcccgccgatgaagtaacgaaaaagcttggggaacctgaacgtattgacccttcggcttatgattacgattggtgggtatacaatcaaggtaaggatcaatatatccaaatcggggtattaaacaataaagtggtcacattattcgcgtcgggtaatgatattaacgccaagcctttcaaaattggagaatcaactggcgaagtatttaagaccacccaggtggcaccatttgtgaatgtagagtataaaggaaattcctatcggtttgaattttctgaagaagatatcaatacaagaccgactgtaaaggtaggaaagatgtatgtccagctgtatatggacaaatttgaggggaagctatccagcattagggcgtttgatgcgcaaacctttgtaaagcaaagaccttatgaggtagtgtaccgcggggaattaattaaaccgaaagccgtttcagatgagaaatggaaaaagatccaaacaacgagcgaaaagcaaatccttgatttgacgaatgtcatacgcgttaaacatggacttgcgaagcttgaatgggatcagccaacggcggaggtggcgtttggacatagtgaggatatgaaggaaaataattatttctcccatgtctctaaaaaatacggctcgctgaaagaccgcttagaagaagggcatgttgactttcagcaagcgggagaaaatatcgcatacaattatgtggacggtccggccgctgtagaaggctggctgaatagcgaaggccatcgaaaagcgttgctgaattcagattatacgcatcttggtgtcggagtagaccggaaatattacacccaaaattttattaagcgatggtaatgaaagccgcggacgaatggttcccggctttttctatttccatacaagctggtctgaatgaatgtgctgatagcttacagataaggccgtttcccattccttcagtcaggctttttcaccagtgtatagggatatcgctaaaaattcatttgggaatgaatataggcgaacacaatgcccgacaaaacgatacattgtagtaggtaacgattttcggagggggtgaggattgtggcgaatcaacatgccaatcattcaatcaatgactttaaacaattcgtcaaaaagcatcccaagctgataaaagaagtgcgcaaagaacaaagaagctggcaggacgtatatgaaaattgggtcctcttcggggagagcgacccgatttgggatccgtatcgggaaccggaagaagcttctgaagctgtgcctgaaacaccgcaaaaaaatgattttgtctcgaaaatggtgacagcggtgaaaaagatggatgtcaatcaaatgaacgaacaaatcaataaaatgagccagtcgatctcatcgttgcaaagccttcttaatacattttccggaagcggacagaagcattctcagccaggctctggacagcatcctttttcttttcgaaaggattaaaaaaggggagctcatatgcgcaaagaggttcaggaatatattttagcaaacgaagaacggaaacgattcatcagagaacagccgatatggtaccgcaggctttcaagaaaaccggatgatctgtcctcctttcagcttgaaatgatgaatttttatgaaaaaaccattccgcatcgggtgaatcagtttacgaacgggattcaaatggcgcaaatgatgatgcaaatgtttcaagcgatgcggacaaaagattaaaaggccccgaaaaagggtcttttttcatgcggacataaggttttgtatacggctgcggttaagcattttccaattggctggtttcatggtaaactaacaactggaggtgcatgttatgtatgcgacgatggaatccgtgcggcttcaaagtgaagctcagcagcttgccgagatgattctgcagtcggagacggctgagaactaccgcaattgttacaagcgtctccaggaagatgaagaggcaggtcggattattcgttcttttatcaaaataaaagagcagtatgaggatgtacagcgttttggcaaatatcatcctgactatagagaaatatcccggaaaatgagggagatcaaacgtgagctggacctgaacgataaggtggctgacttcaagagagctgaaaatgagctccagtccattcttgatgaggtcagcgttgagattgggacagctgtttcggagcatgtgaaagttccgactgggaacccttattttgacggtttgtcttcatgcggaggcggctgcagttcaggcggaagctgcggatgtaaagtgtcctgacgagactggccgtctcgtcttttacatataagagaaaacaggcaggtgattgtattggagaataggcgccagggcatggttgtgtatctgcactccctaaagcagagcaaaatgctgaggaagttcgggaatgtgcactatgtatcaaaacgattaaaatatgtcgtactgtactgtgatatgaaccaaattgaaaaaacaatggacaagattgcgtcttactcatttgtgaaaaaagtggagccttcttataaaccgtttttaaaattggaattcgagtcaaagcttgataaggcaaaagaatacgattataaaatcggcatatagctataaaaaaatccccgcaggcatctgcggggtccttctattccttaatatgttaaggagaaggcaaagggagaggagaaaccggaggaagaacttatggggaaacgtaagtcttctccgcggttggcaacaacatcctctagatgctgttgcttatagtatggacaaggatcatgctgcctatacacctgtttatcaagattagcgttcattgtttggaagaatgctttatgttaagataggattgatttttttctatgtacatagcggcgtccggccgaataaagaaacaaaatagcttttagaaaaagtggtgtggaacatgagagtaatttctggatcaaaaaaaggccgttcactaaaggctgtacccggaacatcaacaagaccgacaaccgacaaagtgaaggaatccattttcaatatgatcggcccttattttgacgggggcatgggacttgacttattcgcagggagcggaggtcttggaatcgaagcgctttcacgcgggtttgagcattgtatattcgttgaccgtgattttaaagcgattcaaacggtaaaatctaatttgaaaacgctggagcttacaaaacatgcacaggtataccgcaatgatgcggaacgtgctttgcacgctgctgctaaaagagaaagcggctttcgcggaatttttctcgatccgccgtataaggaacaaaagctgaaagcacttttaacgctgattgacgaatatcaaatgctggaagaagacggctttatcgtcgctgagcatgacagagaggtcgagcttcccgaaaccgtaggagatcttgtgatgacaagaaaagaaacctatgggttaacaggtgtggcgatttataaaaagagggggtagtgaggtggcgagtatagctgtctgtcccggcagttttgatccggtgacctacgggcatctggacatcatcaaacgcggggcgcatatttttgaacaagtgtatgtatgtgtgctgaataattcttcaaaaaagcctttgttcagtgtggaagaacggtgtgagcttctgagagaagtgacaaaagacattccgaacataacagttgaaacatcgcaaggcctgttaattgattatgcaaaaagaaaaaatgcgaaagcgattttaagaggcttgagagctgtatctgattttgaatacgagatgcaggggacgtcagtaaaccgtgtgcttgatgaatccatcgagacattttttatgatgacaaacaatcaatattcgtttctaagttcaagcatcgtaaaagaagtggcgagatacaacggctcggtatcagagtttgtaccgccggaagtagagctggcgcttcagcaaaaattcagacaaggatgagggttttgactcatcctttttttgttccgtttgtcagtctgtaagaaaaaatgataatgtacgtaaacagcgcgcatagtgtgacagcaggtccgatctgcacaagcagattccagccatttataaaggccgttggcatgtcactgctgttaagagatttaaatacatactgatatggatcatgccatgccgtgtaaagaggtttccataaaagcatgacgaagacagcggcataaacgccctgcagcaaacgtgcgataaagaatggtttaaatctaatgtcggtttccgataaaatacctgccacctgagcttgtacggaaaagccgctaaacccaagaataaagctgacgataatggctttttgcagaagagaaacatctgtctcgctgacaagcttgctgcctaatgtaatttcaaacatccctgataaaagcggaatgtccaattgagtcggaagctgaaacaaagtcagtgctccttttgtgaaaacagacaaaacatcagtcagctggaccactgacaacagccgattgaagacagaaaataaaataataaagccgcctaccataagaagcgtttgaacagaagacgtcacggcgtcgcctaaaattttacctaagggccgtttttctgcaagtctggcggtatgaagagcgtgtaaagcatctttgactgaagggaaaggtatcgttttctttcttctgagatgctgctcttccttgcggccataggagcgcattgttaaaccgacggcaagattccccaaatagtgtgcagaagctaataaaatgcctagtgatgcgttttgaaagaaaccgacggcaacagcgccgaaaataaagagcgggtttgaagaattggtaaacgacgcgagccgttctgcctctactcttgaaatctgattttcctgccgcagacgggcagtgagttttgcgcccgctgggtttcctgatgccattcccatagcaagaacgaagccgccgacacccggcacgcgaaagatcggccgcataaaaggctcaagcaaaacaccgacaaaccgcacaatgccaaagccgattaagagttcggacagaataaaaaatggcagcaatgacggaaacacaacctcccaccacatagacagcccggttttagaggcttcgaatgaggcctgtggatgtgagatgacagtcgctgttaaaaaaagaaaaaacgaggcaatcaaaagtgtattaatcttcgacaagttcattcttacctccccgatgctaaaaatgcccaatgacatgtatatcatgataaaataatgtatgatgtaaaacggccaagcagtacctgtcctcttgattctttgtactaatatacgagcataggggttcagtttagaccatagaattcggtatacagggaattcaggcaggaggttaacgctttggccaaacctaaaatcgggttagcgttaggatcgggaggggccagagggcttgctcatctcggtgtgctttccagtttacataagcaccaaattgaagtggatatgattgcaggaagcagcatgggcgctttggtgggcagtttttatgccgccggacatgacgtggcaacgatgaaaaaagtagccaaagcctttaaacgaaggctttatgctgattatacggtgccgaagctcggttttttaaaaggtgaccgcgtcagacagcttgtgcatgcttatacattcggaaaaccgattgaagagctccaaatcccgctgggcattgttgcgtgtgatctacagacgggagaaaagattgtgttccgaaaaggatcagtgtcagatgcagtgagggccagcatcagcatcccgggtatctttattccgcagcggctggacggacgccttcttgtagacggcgcggtcgtcgatcgaattccggtttctgttgtgaaagacatgggagctgatattatcatcgcttcggatgtttccagggttcgaaaaactgaaacagcagtgcatatttttgatgtgattatgcaaagtatggatatactgcaaaatgaattagtgcggcatcaaacaattgccgcagatatcatgattcgcccttcccttgaaacatacagctcaagctcgtttgccaatattgaagaaatgatatcggcaggcgaagaggcgacaaaccgaatgatcagcaagataagaaaagaaatagagaattgggagggctcataatttgctacgtaaaaaacattttagctggatgctcgtcatcctcatactgatcgcctttttatcatttataaaacttccatactatattacaaaaccgggagaagcgacagagcttgcttcattgataaaagtggagggaggctacccggaaaaaggaagtctgtccttaatgactgttaaagtgggaccggctaatccgtttacatatgtgtgggcaaagatgcacccttattatgaaattgttcctgatgagagcattaaggaggaaggcgagtcagataaggagtatatgaaaagacagctccaaatgatgaaaagctcgcaagaaaatgcggttatagccgcctatcaaaaggcaggaaaaaaagtcagctattcctttaacggcatatacgcaagctctgttgtagaaaacatgccggcaaaagggaaaatagaagtcggtgataaaatcatcagcgcagacggcaaaaactatcagtctgctgaaaagctgattgattatatcagcagcaaaaaagcgggagataaagtcacgttaaagatcgaaagagaagaaaaagaaaagcgtgtcacccttacgttaaaacaatttcctgatgagccggatcgggcaggaatcggagtttcgctttatacagacagaaacgtgaaggtagagcctgatattgattttgaaatcgaaaatattggcggcccgtcagcagggttaatgatgtcccttgaaatctataatcagctgacaaaaccagacgaaacaaaaggctacgatattgcgggaacaggtaccattgatgttgacggaaaagtaggcccgatcggcggcattgatcaaaaagtcgtcgccgcagacaaagccggaaaagatattttcttcgcgccaaatcaaaacggcgccagcaattccgattataagaacgcagtaaaaacagcaaaagatattgattcaaatatgaagattgtgcctgttgataccatgcaggatgcgattgattatttgaataagctgaaagcgaaaagcacctgattctcaggtgctttttctatacatttaaaaagtgttgttcatcttcgtcatatcgaatcggtgcatgtccgtattcctgtaggtcaaactcagttctcagcggctcttctatcggcaggctgtaaatcctgcttgcttttacgtccagatcgagagctggatgggagaaagaggacagtttgctgacaagcggaacagacagtgcttttttcttttcggataaataagcctgtccttttttcgtcatgccgagaagcctgatatacggcgccttatcgttgtcaagcagcttttgcatatcctgtttttttgttctggttaaaatgtgtgtattcatccgctggagccttgtccacgtatagcgttttgttttcagcagttccataaattcctgataggagctggattttctgatcgaacgaataattctgtgctctaaaccttcctccacctcgtatacttgctgtaattcccgtgccgttacagttgaaaggctgtattttaagtaagaaaagtagctttcaggtgtatgccacaatccgaaagatttgcggtaagctgctaattcacgtgcagatgcagcagggagaaaacgaaggcaggcttcgagattctggccaatcatcgcttttctaatgcttgtggcacttgctatatggttttcgccttcagggagatcggcatcatgatagtccgaagagattcgtgccgtagtataaggtttcataggatatcccccggttagaatcgaggtcacatactggtatcccaaaatgttatttggttttgacaagtcaagtgcactttcagtatgcaaaatggagctgaaggcgatagccgccgctgctgggtaactggccccctttttaagttcttctttaattcggtcattcaatatatgtttatgctcatcaataagctgtgctgtttctaaaaaaggcttgatatccccattttcactcccgaaaaacagcgcctcacattcaagttcgttcaggatggaaacactgccgcgtgcaaaaatgtctgctttttgcacggcataaagataaggcagctcaatgacaagatcaactccgctttgcagcgccatttttgttcgggcccattttgatacaacagcgggctccccgcgctgtaaaaaatgcccgctcatgaccgcgacagccgtgtcacatccggtttgccgctttgctgtttgggcatgataaaggtgaccgttatgaaagggattatattcaaccaccaatccgacagctttcatattttttccgcctttcttgctatgtttaaaaacgtatggtacatttgcaaatgaaaactcttacgccttatttttgttttaagtgtatgcatagcatattccgctgtcaacgatacttcaatggcagcattatgctgtaaagaaaaaatattgacaaaaacaatcttaaaagctataatcatgtttgttgctttcctgaggtgatacaaatgaaatggacgatttatcagctgcatcaaatgccaaaacaaagttttgagtttgatgaaacagttgagttaaatgagctgacaaagctgaattctgacattcgccgcatttctcccgtccgggtgaagggcagagcggatatcaaatccaaacaggtttcgtttgattttacaatttcaggcgaaatgattttgccatgctcaagaacactcgttgatgtcccgtatccatttgaaatttcaacaaaagaactgtttatatttcatcacacggatgatatagaagatgatgacgttcacattgttgaggacgatactatcgacttaactccgatcgtgaaagaagaaattcttttagaaatccctatgcaaatcttttgtgaatctgaacaagaaaaaggagctgctcctcaagaaggaaaggattggcaagtcatttcggaagaagacaagaagaatcaagttgatccgagacttgcagccctcgaaaagctcttaaaacaagatgatgaatcttaactctttaaggaggtgggaataatggctgtaccttttagaagaacttctaaaatgaagaaaagattgcgccgtacacatttcaaacttaatgtacctggtatgacagaatgtccgtcatgcggagagatgaagttgtctcaccgtgtatgcaaagcatgcggatcatacaacggcaaagacataaatgtaaaaagtaactaataagaaaagcgcggggtgaaaagccctgcgctttttctttttctcttcctgtcagcttgcggaaaatttgtgagtgcaaatagtctatctaatctattaccggcatatgtatgagataaataagctgacatggagggagattgaatttgaccattacaagacaagatgcttggactcaggatgaggatttgctgctggcagaagtggtgcttcgtcatattcgagagggaggaacacagctttcagcctttgaggaggttggaagggcgctgaccagaaccgcggcagcctgtggtttcaggtggaactcgtatgtgagaaaacaataccagtcaggtatagagcttgcaaaaaagcaaaggaaagaactgagaaagcaaatcggtgttcattcggtcaatatgccgaattccatgaagcagactgcctcggcatcgtcagaaggaaaacgagatttgtccattcaggatgtcattcaatttctcgaacaattcaaagaagcaccgtctgcacaagaatttcagcttgaaagggaaaaattgaaggagcaaatccaatcgctgcaaaaagagcttgaggatttgcggagtgaaaatcagacattgcggaatcagctagagatgacagaagaggattacaaggcactgatcgatatcatggatcgggccagaaaaatggttgtttcgaaggaagacggaagaatgaaaaaagcggctcaagaaacgtaaagaaacgcctgaaatgaaccggccctatagtaagaataggccggttgttttgatttctatgcagactctcccggtgtcatttcatgatccatatcaggatgccagatgagcgggttttcccctttgtcccgcgccatatcatacttaacagttttaaagttcattttgttccaaaattccgctgatttcattctcggatttgtccggatcggcattttgaatgattttgcaaattcaaccaaggctctcccgtatcccctgttctggtagcccggaagaacctcaagcttccacagctccaaataatcctggcggttgtcaaaatagggattcgatttgccgttaacttgatacagactcattcgtgctacaagtttatcgccaaaataaatcccgtaaaaaggcgaagtgctgtcattttcaataatattatcctgaagttcttcaagcattgaaagctcctgaatgccgtattctttgaatttcttgaattcttccagcgttttatagttgataagcagacgttctacctttgtcaaacaaatctccccctttgttgtttctacatatattgtaaacgctttatttaaaaaatccaaatatttaaactttaattttaagcacatgggatctttgagaagtaatttcttcttacttctgctatgataatacgtaaatgctaaattgggtgtgacatcatgaaaattggaattatcggcggaggctccgtcggtcttttatgcgcctattatttgtcactttatcacgacgtgactgttgtgacgaggcggcaagaacaggcggcggccattcagtctgaaggaatccggctttataaaggcggggaggaattcagggctgattgcagtgcggacacgagtatcaattcggactttgacctgcttgtcgtgacagtgaagcagcatcagcttcaatctgttttttcgtcgcttgaacggatcgggaaaacgaatatattatttttgcaaaacggcatggggcatatccacgacctaaaagactggcacgttggccattccatttatgttggaatcgttgagcacggagctgtaagaaaatcggatacagctgttgatcatacaggcctaggtgcgataaaatggagcgcgttcgacgatgctgaaccagactggctgaacatcttgtttcagcataaccattcggattttccgatttattatgagacggattggtaccgtctgctgacgggcaagctgattgtaaatgcgtgtattaatcctttaactgcgttattgcaggtaaaaaatggagaactgctgacaacgccagcttatctggcttttatgaagctggtatttcaggaggcatgccgcattttaaaacttgaaaacgaagaaaaggcttgggagcgggttcaggccgtttgtgggcaaacgaaagagaatcgttcatccatgctggttgacgtcattggaggccggcagacggaagctgacgccattatcggatacttattgaaggaagcaagtcttcaaggtcttgatgcagtccacctagagtttttatatggcagcatcaaagcattggagcgaaatacaaacaaagtcttttgagctttttcggtaacatgctatactcatttcggatcactaactatttattggagaaaggaagttctagaagatgcagctaactgaactttccatcaaaaatcagaatgtgtttgtacagcactatatagatggcaaagaagaaatgtcttcttttttgattacagtattcatcataaggacatgtggcgcgaaagaatggaagacttatcttcccggtttttcgcaagagaggaattggcggcgtacttaacctcttaccataataaattcggttcaagtgcgatgcagtctgccattgagaagctgaaggacccgtcaagtgccgcagtagtcggcggacagcaggcaggacttttaacaggaccgctttacaccatacataaaattatttcaatcattgttttagcaaagcaacaagaaaaggaactgcaagtgcctgtcataccaatcttctgggtggctggagaagaccacgatttggatgagattaattttgttcacacatctgaagagaatggacctgtgaaaaaaaagctgcctcagtcttattggaagaaatcatcagcagcgagtacatcgcttgatcaggaaaagtgtgccgcgtggatagatgatgtttttgccgcttttgaagaaacagaccatacgaatacacttctcgacaatgtgaaacgatgtttaagggaatctgttacgtttactgacttctttgaactgctgattgcggatttgttccaagaagagggcttagttttattaaattctggagatccggggattaaaaagctggaaacggccatgttccaaaagattcttcgagaaaatgatgaactcgcccgcgctgtatcagatcagcaggccttcatgcgtcaagcaggctacaaaccgattatcgagtccggaaaagagcaggcgaatctgttttatgaatacgaagaagagcgttttttaattgaaaaagacaacggccgatttgtcatcaaagagcttgatctaggatggacgagggatgaacttcatacacatatggaagaacatccagagcgtttcagcaacaatgttgtaacgagaccgttaatgcaggaatttctcattccgactttagcatttattgcagggcctggggaaatcaattattggggcgagctcaaacaggcttttgcggtgatgggcttcaaaatgcctcctgtcatgccaaggctgaacattacgatacttgagcggcatattgagaaaaaactggctgaacggaatatctcattacaagacgcgattgagcgcggaacggagaatcaaagagagacatacttcgagcgccagattccggaagagtttacggcggtgatggatcaggcgaaaagccaaattgaagcgattcacaaaacggtccggcaggaggcgttaaaggttgatcaaagcatggaacctttactcctgaaaaatgccgcttttattcaggatcagcttcaattcttagagcgcacggtgacgaagcgaattgaagaaaaagaaggctacgtcttgaaggattatgaaagaattcaaaatagcattaagccgcttcttgcgccgcaagaacggatttggaatatcatgtattatttgaacaggtacggtccaaaattcttcacgacattcaagaatctgccattttcttttcaaaatcaacatcaagttgtcaaactttgaaataaagttttaaagaaccctgaatagttcagggtttttttttatgggtaaacagtgtaaaatgaagttgtggagcgaagtggtgaatagtggtgagttaaggagagaaagtggggcaagagatcatgtttatgggtgaatatcagcataccatcgatgcgaaaggccgcatgatcgtacccgctaaattcagagaaggcctaggtgagcaatttgtgctgactagaggacttgaccaatgtctcttcggctaccctatgcacgaatggaaacaaattgaagaaaaactaaaagctcttcctctcacaaagaaagatgcccgtgcgtttacccgtttcttcttttcaggggcgactgaatgcgaactggacaagcaaggcagggtaaatatcgcatcatctctattgaattacgccaaactggaaaaagaatgtgttgttatcggggtttctaatcgaattgaattgtggagtaaagtaatttgggaacaatacacagaagagcaagaagattcatttgctgaaattgctgaaaacatgattgggtttgatatataatgattcttcgtgtataacactctaaaagcaatttcaattcatcctgataaaaggtgggaccaacacaatatgtttcaacacaagacagtacttcttcgtgaaaccgtagacggactcaatattaagccggacggtacatatgtagactgcacactcggcggagctgggcacagtacatacttattgcagcagttatccgagaaggggcgtttaatcgcttttgaccaagatgatacggcattacagcatgctaaagaagtgttgtccgactataaaggacagctcattctgattaaaagcaatttcaggtatttaaaagaatgtttgaatgaacaaggcattacagaagtagacggtattttatttgatttaggggtgtcctctccgcagctggatacaccggagcgcggattcagttaccatcatgacgcaccgttggacatgaggatggaccagtcggctacgcttacggcgaaagaagtcgttaatgagtggcgctatgaggatctcgtccgtattttctttaaatacggagaagagaagttcagtaaacagatcgccagaaaaattgaggaggcaagaatgaagtctcctattcaaactacgggccaactggtcgatctaataaaagacgcgattcccgctccagcgagaaggagcggcggacatcccgctaaacgcgtgtttcaggcaatcagaattgccgtaaacgatgaacttagggtgtttgaagaagctttggagcaggcaattgaggttctgaagccagggggcagggtatcagtcattaccttccactcgctagaagacagaatttgcaaaaccacttttaaagaaaagtcgtcgcttccagaacttcctccgggacttcctgttataccggaagagtttgaaccggagctgaagctcatcacacgaaaaccgattacggcaactcaagaagagcttgaagagaacaaccgggctcgttctgccaagcttcggattgctgaaaaaagaaaataacgaaacgcgaacgcaaaattaaaaggaggtcatcagcctatgagcaatttagcttaccaaccagagaaacagcagcggcatgcgatcagtcctgagaaaaaagtgattgtcaagaaaagggcttccattactctcggagaaaaagtgcttcttgtcctctttgctgcggcggtgctcagcgtatcgcttttgatcgtatcgaaggcgtatgcggcatatcaaaccaatattgaggtgcaaaagcttgaggagcaaatttcatccgaaaataagcaaattggtgacctcgaaaaaagcgttgctgatttaagcaaaccgcagcgcattatggacattgcgaaaaagaacggcttgaatttaaaagataaaaaagtgaaaaacatacaggaatgattcaaatgccaaaaaagaataaatttatgaatagaggagcagcgattctaagtatttgtttcgctctctttttctttgtcatcctggggagaatggcatatattcaaataaccggaaaagcgaacggcgaagtgcttgcgacaaaagcgacagagcagcatgaaaagaaacggaccatcgaagcgagccgcggctcgattttagaccgaaaaggaaaagtcattgcagaggacacagcgacgtataaactgattgcgattctcgataaaaaaatgaccactgatgtcaagcatcctcagcatgttgtaaacaaagaaaaaacggcagaagcattgtctaaagtgataaacttggacaaggccgacatccttgatatcttaaataaggaggatgcaaaacaagtcgagtttggctcagctggccgggatattacgtattcgcaaaagcaaaaaatcgaaaagctgaaactcccgggcatttcatttttacgggatacaaaacgctattatccaaacggtgtttttgcatccaatttaatcggctatgccgaggttgatcaagacacaaatgaaatttccggcgcgatggggttagaaaaagtgctggataagtatttgaaggagcgggacggatatgtgacatatgaaagcgacaaatccggctgggagctcccgaacagcaaaaataaaattacagcgccaaaaaatggtgacaatgtatatttaaccattgaccagaaaattcaaacctttttggaagacagcatgacaaaagtggcgcaaaagtataatccgaaaaaaatcatggccgcagttgtcgatccgaaaacaggcaaagtccttgccatgggacagcgaccaagctttgatccgaacaagcgggatgtgacaaactactataatgatttgatttcatatgcgtatgaacccggatcaacgatgaagatatttacactcgctgctgcgatgcaggaaaacgtgtttaatgcgaacgaaaaatataaatcaggtacgtttgaagttggcggggaacctgtcagggaccataatagaggtataggctgggggccgacaacctatcatgacggcgtccttagatcgtcaaatgttgcatttgcgaaactggcgaaagaaaagctgggatatgaccgtcttaatcaatatttacacaaattcaatttttatcaaaaaacaggtattgatttgccaggagaagtctctagcaaaatcaactttaaatatgaatttgataaggcgtcaaccgcatacggacaagcgtctgcagtcacaccaattcagcagcttcaggccgcaacggcaattgcgaatgacggcaaaatgatgaaaccttatgtgattgaccatatcgttgatcccgataaagataaaaccatctatcaaaataagccagaatcagccggaaccccaatttctgcaagcacagcgaaaaaggtgcgggatatattgggagaagttgttacgtcgaaaatcggaacagggcaagcctataaaatcgaaggatttgatgttgccgggaaaacaggtactgcgcaaatagccggtaaaggcggatatctagacggaacagatgactatatcttttcgtttatgggtatggcaccaaaagatgatcctgagcttttaatttatgttgctgtacagcagccgcaactcaaagcaggacaaagcagttcagatccggtatcagaaatcttcaacccgacaatgaaaaacagcctgcactacctgaacattgaaccaactgaaaaatctgactcagataaggaagaaacaaaagcgcagacaatgcctgatttaacagatcaaacggtagctgctgctcaaaagaaagcaaaagaggagaatctcacaccaattgtcatcggcagtgatgtcgctgtaaaagaacagtatccgaaagcggatgaggaagttctcaccaatcaaaaggtcttcctgaaaacgggcggcaaaatcaaaatgcctgatatgacaggctggtcgagaagagaggttctgcagtacggcgagctcgcgggaattcatattgaagtaaacgggcaaggctacgctgtcagccaaagtgctaagaaagacaaagaaatcaaagacaaaaccgtaatcaaggttaagtttaaaaatcctgattaaaaagaaagcttgcgttatgcaggctttctttttttatgccttcagaggagcatcgttctacctgtccaatttcaggcataaaatgaaacaagcctaaataaggagtgaacggtctcttgcgcgtctcgaatgtaacggttagaaaacgtttattatttgttttgctttttggcgtgatcgtgtttctgatcattgatacaaggctggggtatgttcagtttgtgatgggcgaaaaactgacttcgctggcgaaagattcctggagccggaacttgccgtttgagccggagagaggcgagatactggatcggaatggtgtgaagctcgcaacaaacaaaagtgcgccgaccgtattcgtcgtgccgcgccaagttcagaatccgatgaaaacgagcaagcagcttgcggcggtgctcaatatgtcagaagaaaaagtatataaacatgtgacaaaaaaagcgtcaatcgaaaagatcactcctgaagggagaaaaatttcaaatgagaaggcgaaggaaattaaagcgcttgatttaaaaggtgtgtatgttgcggaggacagtatccgtcattacccgttcggcagctttttatctcatgtgcttggatttgcaggaattgacaaccaaggactccttggattggaagcctattacgacgatgatttaaaaggggaaaaaggttctgtcaagttttatacagatgccaagggtaaaaaaatgcctgatgaagcggatgactatacgccgcctaaggatgggcttgatatgaagctgacggttgattcaaaggttcagacgataatggaaagagagcttgataacgctgaggccaaatatcatccggacggcatgattgccgtagccatgaatccgaaaaacggagaaattttggggatgtctagcaggcctgacttcgaccctgctgattaccaatctgttgatccgtccgtctacaaccgaaatctgccagtatggagcacgtatgaaccgggatctacctttaaaattattacacttgcagcagcccttgaagagcaaaaagtaaatttgaaacgggatcaattttatgataaagggcatgcggaagtggacggagcgagactgcggtgctggaaaagaggcgggcacgggctgcagacgtatctggaagttgtgcagaactcctgcaacccggggtttgttgaattaggcgagcgcttaggaaaggaaaagcttttcaaatatatcaaagactttggttttggacaaaaaacggggattgatctccaaggcgagggaacaggcatcttattcccgcttgagagagtaggcccggtggagcaagcaactacggctttcggacagggagtatccgtcacgccgattcagcaggttgcagcagtctccgccgctgtaaacggaggaacgctctacacaccttatattgcaaaggaatggatcgatcctgttacgaagaaaacggtcaaaaaacaatcaccaatcgcaaagaaacaagtcatttctgaggaaacatccaaacaaatccgctatgctctagaaagcgtcgtcgcagaaggaaccggccgcaatgcatttgtagaaggatatcgtgtcggaggaaaaacgggaactgcacaaaaggttaaagatggaaaataccttgaaaacaaccatattgtatcatttatcggtttcgcgccagctgatgatccgagtctagtcgtctacgttgcggtggataacccgaaaggcacgattcaatttgggggaacggttgcagcgcctattgtcggaaatattatgagagacagtctgccggaacttggtgtgaagccccggaaaaatcaaatcgagaaaaaataccaatggaacgacacaaaaacaatagaagttccgaatgttgtagggatgtctgtctcagatcttgagtcactattggtgaatctcaatgtggatgcttccgggaaagggagcaaaatcgttaaacaatcgccagctgccggaacgaaagtaaaagaaggctcaaagatacgcgtgtatttgactgaagaagatgaaaaggaggcagccgattgattcgggctgcctattcttttattgcagaaaaaatgctgatatctttcaagattagctggatgtatccttttatttacgctaaaatatgaactgtatgcttaaaatcattaccacatcatttgatgtgacttcaatgataaaaagaacgaattagaatgttgagaggtttgatacgatgaaacttacaaagctgcttacatacttaacaaccgaaccttctgtaaacgactcacaagaccctgaaataacttcaattgagatggactccagggaagtaaagaaagggagtctttttgtatgtgtaaaagggtatacggtggatggccacgattttgcgcaaaaagcagtagaaaacggtgcagcggctattgtggcagaaagagaggtcgatgtgaatgttcctgttattattgtccggcagtcacttcgcgcgctcagcgttttgtctgatgcgttttacggacagccgacgaagaagcttcagctgattgggataacagggacaaacggcaaaacatcaacgacccacatggtcgatgagattctgaaaaaagcgggaaaacgcacaggcttgatcggtacaatgtacatgaaaatcggagacgaaacacttcctgttaaaaacacgactccggaaagcgtcacgctgcagaaaacgtttaagaaaatgaatgacaagcatgttgacactgcaatcatggaggtttcttcccacgctttgtctttaggacgcgtccatggctgtgattatgatattgccgtgtttacgaatttaacacaggaccatctggactatcataaaacgatggatgagtaccggcatgcaaaaagcttgctcttttcccagcttggcggggctttcaaccatgaacatccaaagcgtgccgtcctgaatgctgacgatgaggcgagcgcttattttgaaaaggtaacagctgcgcatatctctacatacggaattaaaaacgatgctgatgtgatggcgaagaacatcagtatcactgcacagggcacaagctttgatctcgtgacaaacaaaggcacgaagcacatcacgatgtctctcgtcggacaatttaatgtgtataacgtgctggccgctgttgcgacatgtattgcagcaggcataccgtttgaaatcatcactgaagctgttgaagaattgcatggtgtaagaggccgttttgaattggtcaatcagcagcaggagtttccagtcattgtagactacgcgcacacaccggacagccttgaaaatgtgctggagacatgcagagacatgacggaaggaaagctatttgtcgttgtcggctgcggaggagacagagataagacgaagcgcccgaaaatggctaaaattgctgtggagctggctgacgagccgattttcacgtcagataacccgagaagcgaagatcctcgcgcgattttaagagatatggaagccggagtagagaacgcatactatcacagtattgcaaaccgcgagcaggcgatctttttcgcaattgccaatgccaaaaaaggcgacgttgtcctcattgcgggaaaaggacatgaaacctatcagcagatcggaaatgaaactttcgattttgatgatgctgaagtagcggcgagagccattgttgaactcaataagaataagacgaattcataggaaagagatgttactgaataatggagcttgaaaagatttttcatatggaaaaaaatcatgaatatgataactacgtatgtcgtttgaaagaaacaggaggagaaaaggacaatgcttgagcaagtcattctgtttacaattttaatggggtttttaattagtgttctgctctctccgattcttattccgtttttaagaagattaaaattcggccagagtattagagaagaaggaccgaaatcacatcagaaaaaatcagggacaccgacaatgggcggggtcatgatcatactttctatcatagtgacaacaattgttatgacacagaagttttcagaaataagccccgaaatggtgctgcttctgtttgttacgctaggctacggtttgcttggctttttagatgattacatcaaggttgtcatgaagcgcaatcttggattgacatcaaagcaaaagctgatcggacaaattattattgcagttgtattttacgccgtgtatcattactacaattttgcgacggatattcgcattcctggaactgacttatcatttgatcttggctgggcttactttatccttgtgctctttatgcttgtcggcggatcaaacgcagttaacctgactgacggccttgacgggttattgtccggtactgcggcgattgcctttggcgcctttgccattctggcatggaatcagtctcaatatgacgtagcgattttctcagttgccgttgtcggtgcagttctgggcttccttgtatttaatgctcatccggccaaagtttttatgggagatacgggatcgcttgcattgggaggagccatcgttaccattgccattttaacgaaattagagatcctgctggttatcatcggcggtgtattcgttatcgagacattatctgttattttgcaggtcatcagctttaaaacgacaggtaaacgaatctttaaaatgagtccgcttcatcaccattatgagcttgtcggctggtctgaatggagagtagtcgtgacgttttgggctgcgggacttttgcttgccgttttaggaatttacatcgaggtgtggttataagtggaaaatgatcaatttttacagaaacagcattttttaatccttgggcttgcgaaaagcggatatgcggcggcctccattcttcatgaaaaaggcatttatgttgcagtcaatgaccaaaagccttttgaagaaaatgaaccggcacaaaagctttctgaaaaaggaatcgaagttgtttgcggagagcatccagtttctctgttcgatcagcatcaaatcacgattctgatcaaaaacccgggaattccttatgaaaatattatggttcaggaagcggagaaacgaggcattccggtttggacggaaattgagctcgcttactacctgaccagcgccaagtttatcgggattaccggatcgaacggtaaaacgaccacgacaacgctaatttacgaaatgctcaaagctgactcgcaaaaagcactgattgccggaaacatcggcacagtcgcaagtgaggttgcctatcatgctgatggagatgaatggatcgttaccgaactgtcttcgtttcagctgatgggaacacacgctttcagaccggaaatcagcctgattttaaatgtatttgacgcccatctggattatcaccatacgcgcgaaaactatgaaaaagcgaaacagaaagtgtaccttcatcagactgcttcagataaagccattgtcaaccaggatgatgaaaccgtcgtgcgtcttgctgaagccggaaaagccgaaatcgtcccgttttcagtcagcaaaacgcttgaacagggcgcatatgtaaaagacagtatgattatgtttaacggcgaagccattcttcctctggaagaggttgtactgcccggtgctcataacctggagaacattttagcagctattgcagttgtgaaaacggcaggagcatccaatgaggcggttaaaaaggtgctgacaagctttactggtgtgaagcaccgcctccaatatgtcacaactgtgaatggccgcaaattttataacgacagtaaagcaacaaacattctggcgacaagcaaggcgctttcagcttttgacaagccggtcattctgcttgcgggcggactggatcgcggaaatggttttgatgacttgaaaccttatatgaagcatgtcaaagcagtgcttacatttggccagacggcgccaaaactcgagaaactcggcaatgaactgggaatacaacatgtcaaacgtgtcgataatgttgaacaagcagtatctgcggcgtttgcgctctcaaatgaaggagatgtcatcctgctgtcacccgcgtgtgcgagctgggatcaattcaaaacatttgaagaacgcggtgacatgtttatagatgccgtgcatatgcttaagtaagggcttgtcttgaagtaaatcggcagccctaatgactttaagcttggggtgtcgattgctttgactactaaaaaaacatcgcctgatttgttattggtcatcattacgttattattattaacaatcggattaattatggtgtacagtgcgagtgcggtatgggcggattataaatttgacgactcattctttttcgcgaaacggcagcttttgtttgcgggaatcggcgtcattgctatgttttttatcatgaatgtcgattattggacttggaggacatggtccaaattgctgatggttatctgctttttccttctggtgcttgttttgataccgggcgtcggaatggtgcggaacggttcaagaagctggatcggagtcggagcattcagcatacagccttcagagtttatgaagcttgcgatgattgcattccttgctaaatttctctctgaaaaacaaaaaaacatcacatcgttcagacgggggttcgtccctgcacttggcatcgtgttttcagcatttttgattatcatgtgccagcctgacctcggaacggggacagtaatggtcggaacttgtattgtcatgatttttgtagccggcgcgcggatcgcccatttcgtctttctcggactgatcggcctcagcggatttgtcgggctcgtactatcagctccatatcggattaagcggattacctcatacttaaatccatgggaagacccgctcggaagcggatttcagatcattcaatcgctttatgcagtggggcccggtgggttgttcggaatggggctcggacaaagcagacagaagttcttttatctgcctgagccgcaaacagactttattttcgccatcttgtcagaggagctgggctttatcgggggaacacttattttgctcctcttcagtgtcctgctgtggagaggaatcagaattgcgcttggtgcgcctgatctgtacggaagctttgtcgcagtcggcattatttcaatgattgccattcaagtcatgatcaatatcggcgtagtcacgggcctgattcctgtaacaggcatcacgctcccgtttctgagctacggaggctcttcattgactctaatgctgatggcagttggtgtgctgctgaatgtaagccgctactcgaggtattaacgaatgtatgtccatgcttcctgtctaacatgaagcttggaaacaattgatgcgataaccctgtccaacaaaacagggttatcgttatgttatagagaaacttagactgggggaaaagaaatgcgaattgcaataagcggaggcggtacagggggacatatttatcctgcgcttgcttttattaaagaagtgcaaagacgtcatcctaatgtggaatttttatatatcggaacagaaaacgggctggagaaaaaaattgttgagcgggagaatataccgtttcgttcaattgaaattacaggatttaaaagaaaattgtcatttgaaaatgtcaagactgtgatgcgttttctgaagggcgtcaaaaagagtaaatcgtatttagcggaatttaagcccgatgccgtaattggaacgggcggttatgtatgcgggccggttgtctatgccgctgcgaaaatgggaattccgactattgtccatgaacaaaacagcctgccgggcatcacgaataagtttctttcaaaatatgttaataaagtagcgatttgttttgaagaagcgaaatcacattttcctagcgagaaagttgtatttacgggaaacccgagagcctctgaagtcgtctcaataaagacgggacgatcaatggctgaatttgggctttctgaagacaaaaaaacggtcttaattttcggcggaagccgaggcgctgcaccgattaaccgcgctgtcattgacatgcaggatgcgctgaaaacaagagactatcaagtgctgtatatcaccggtgaagttcactatgaaaaagtaatgaatgagctgaaaagcaagggtgccgctgataatatggtcacaaagccgtttcttcatcaaatgcctgagtatttaaaggccattgatgtcattgtggccagagccggtgcgacaacgattgccgaaattactgctctcggaatcccaagtgttctgatcccaagtccatatgtgacagcgaatcaccaggaggtcaatgcgagatctcttggccagcataatgcggcgattgtactgaaagaaacagagctcagcggggagaagctgattgaagcgctagaccggattgtactgaatgagcaaacgttaaaggaaatgagcgaacgaacaaagtcactcggtgttcctgacgcggctgcccgtttatacagcgtactcgaggaattaaaaaaatagtagaaaagcaaatggaatgcggaggtttacgatggagaaagtgatacaggaattaaaagaacgcgaagtcggcaaggttcttgcaaatgaaccgctcgcgaatcatacaacgatgaaaatcggcggacctgcggatgtattggtcattccaagcagtatagatgctgttaaagacatcatggacgtgattaaaaaatatgatgtgaagtggacagtcatcggccgcggatcaaatcttcttgttttagatgaaggaattagaggcgtagtgatcaagctgggggcgggtcttgaccatttggagcttgaaggggaacaagtaacagtcggaggcggttattcagtggtccgccttgctacatcattgagcaaaaaaggcctgtccggtttggaatttgctgccggcattccaggatcagtcggcggagcggtttatatgaatgccggcgctcacggttctgatatgagcgagatcctcgtcaaagcgcatattttgtttgaagacggaacgattgagtggctgacaaatgagcagatggatttcagctacaggacatctgtactgcaaaagaaacgcccgggcgtttgccttgaagctgttttgcagctggagcagaaggataaggaatcaatcgttcagcaaatgcaaagcaataaagactatagaaaaaatacacagccgtattcaagcccttgtgcgggaagcatattcagaaatccgcttccgaatcatgccgggaaccttgtagaaaaagcaggcttgaaaggatatcaaatcggcggtgcaaagatatcggagatgcacggaaacttcatcgtcaatgcgggaggagcatcagcaaaagatgtgcttgatctcattgaccatgtgaaaaagacaatccgtgaaaaatacgagattgatatgcacacagaggttgaaatcatcggcggaaatcgctgattcaagttctgactgaagctgttcatatgatatactgtaagcaaacgacaaacggcatcatagtatgccgtttgttttggaatagacagacttttaacagctgtttcatttgaatgaggtgaacaggcaatgaacccgggtcaagaccgagaaaaaatcgttaacattgaagagcggatccctaaaattaaagagcagaggaaacaaaaggcaaaccgccgtctcatttcatttattatgctcttttttattatggtgctgatcattgtgtacctgcaaacaccaatcagtaaagtatcaacaatctctgttacagggaatgaaaatgtatcaaaaaaggaaattatcgacctttccgatattaacagcggagatactgagttttggagtttggacaagcaaaaaacagaaaagaagattcagcaaaataaattagtgaaaaaagcggagatcagcaaatcgcttcctaataaaatcaacattgcaatcgaagaatataaagcgattgcttatttagaaaaagacgatgtgtactatgaagtgcttgaaaacggctcagttctgccaaacgaagtaacgccggatgatgccggaccgattttagtgaattggacaaacgcgaagaagcggtctcaaatggccaagcagctcgatgcgttgtcaaattcgttaaaacagtcgatttcagagatttattatacgcctgtaaaaatggatgaaaaccgtattaagttgtacatgaacgacggttatgttgtcactgcatctattaaaacgtttgcagaccgaatgaagacgtatccttctatcatttctcagctaagcagcaataaaaaaggaatcattcatttagaagttgccacctattttgaagagtttgggaaaaacgataaggctgctaaaaaggaagatgaaaattgaggggcaaatcagcagtccttctttccttgattatgcttatcgcaggctttttgatttcattttcttttcaaatgacaaaagaaaacaacaaaagcgcggctgagacggaagagtggaaaaaagaatatgcgctgagagatgaacttctgaaacaagagaaagaaaataagaagcttgaaaaagaattatatcaaaagcaaaacaaagtccgccaggcggaaaataagctgaagaaagagaagtcggaatactataatgtcctcgaagatacagaaaaatacaggatgtatattggggaagtcggtgtgcagggagaaggcgttgaggtgacattggaagatgcgtcatacataccggaaggggagaatgtgaatagttacatcgttcacgaaagccatatcttccaagtagtaaacgaaatgtatatctcaggagcggcagctgtcgccgttaatggacagcgtttgacgcatgattcgtatatcaaatgcaatggtcctgtggtaacggtagacggggtgcagcatcccgctccatttacggtatccgctattggagatccagatgtcctgctgccctcgttaaatatcgctggaggcctaattgatcagctgtcaatggatcatatttctgtgtcggcagaaaaagagaaaaacgtacaaatgaaaccgattctgaaaacgaaggaatgactgaaaaagcgggtgaaatagattgaaaataaagcgttccttcataagcatcagtgtgcttatggtcatcttcggcctgatgatatctgttcagtttaattcgttaaagcaccccaaagtccgggatacaagagatatgtgggatattagggaagagctgacatcagagcagaagaagcaggaaaagctgctgtctgaaataaacaaatatgacaaacttctgaatagctattcgcaaacgaaagaaatgacaaaagaaaccgcgctaaataataccttgcaatccttaaaaaaaacagccggcatgaccgatataacaggtagcggaattgtcattacgatttccccgcttttttctgaaagcttaacaggagagccggtcgaaaatccgcctccggatttgctgaaaaagctgattaatgaactcaactcctacggtgcagagcatatctcgattaacgagcgaagagttgtgaatcatacagttatcagagatataaacggcactacaaaaatagacggatacgcccttgacgattatcctttaacagtaaaagtgcttgccaaagatccggacatgttacacagcggagtgaaggggtcaggccttgaggatctttttgcatctgaaaatttagcattaaaagccggtaaatctgaaagcaaactaacattaaaagcatatgacagaccactggacgtacaacagctgaaactgcttaaagactgaaaaggaggagaattgtcatgtggctgcccgtgttgggactggtgctcggaatagcgattggactaatgacaaacttaacgataccgagtgaatactcaaactatttatcgcttgcggtgcttgccgcacttgatacattaatcggcggaatcagagcgcatttacaaggtacatatgatgaaatggtatttgtttccggtttcttttttaatattatattggcaataagtttagcttttctgggagtccatcttggtgtagacttgtatttagcaggtatattcgcatttggagtcagattatttcagaatatagccgttatcagaagaaatctactaacaaagtggactctttctaaaaaaaataaaaaaaatgtgatataaaagaggatatacataggatataacgaatattttcaataaacataaaatgtgaaaagcacataaaaatattctgttgttattttttgttacacacttgtaaagccacattcattgtattgttgttccgcaaataatagaatagaaatgatcgaaatgtgaggaggtgccatagaatgaacaacaatgaactttacgtcagtcttgacatcggtacgtccaatacaaaagtgatcgtcggagaaatgacagatgattcccttaatattatcggtgtgggaaatgtaccgtctgaagggttgaaaaaaggctcaatcgttgatatagatgagaccgttcattctataagaaaagcgtttgaccaagctgaaagaatggtaggttttccgcttagaaaagctattgtcggcgttaatggaaattatatcaatattcaagatacaaacggtgttgtagcagtttccagtgaaaataaagaaattcaggttgaagatgtacgccgtgtcatggaggcggcacaggttgtttcagtaccgcacgaacagctgattgttgacgtcattcctaaacagtttatcgtagatggaagagatgaaatcaccgacccgaaaaaaatgctgggtgtgcgtttagaagtagagggcaccttgatcaccggttcaaaaacaatcttacataacttactccgctgcgttgaaagagctggtattgaaataactgatatttgccttcagccgctggcagccggttctgctgcattatcaaaggacgagaaaaaccttggtgtggctctcattgatatagggggagggtcaacaaccattgccgtattccagaacggacatctcacttctacccgtgtcattcctctcggaggcgaaaatatcaccaaagatatctccatcggattgagaacgtcaacagaagaagcagaacgcgtgaaaaagcaatttggacatgcctactatgacgaagcctcggaagatgaaatatttgaggtaaccgttataggcaccaatcaaaaacaaacatttacacagcaagaagcagcgaatatcattgaagcgagagtagaagaaattcttgaaattgtttcagaagagcttcgcagtatgggaattaccgatctgccgggaggcttcgtgctgacaggaggacaagcagctatgccgggtgtcatgtctttggcgcaggatgtgctgcaaaacaatgtcagagtggcaagcccgaattatatcggtgtaagagatcctcaatatatgacgggagtgggcctgatccaattcgcctgccggaatgcaagaatccaaggcagaaaaataggctttaagatgcctgaagaagcgatacaggaaatcgcagtctcatcatctgaggaacaagagcagcatcatcaccaaaatgaggtgcagcagcggccaaaaggaaaacaaaaaacacaagccgaacataataaacagagcaaaatgaaaaaactattaagcatgttttgggaatagatagatagtcattcggcagattaggaggatttagcatgttggagttcgaaacaaacatagacggcttagcatcaattaaagtaatcggagtaggaggcggtggtaacaacgccgttaaccgaatgattgaaaatgaagtgcaaggagtagagtatatcgcggtaaacacggacgctcaagctcttaacctgtcaaaagcagaagtgaaaatgcaaatcggcgcaaagctgactagaggattgggagcaggtgcgaatccggaagttgggaaaaaagccgctgaagaaagcaaagagcagattgaagaagcacttaaaggtgctgacatggtattcgtgacagctggtatgggcggcggaacaggaacaggtgccgcaccggttatcgcacaaatcgcgaaagacttaggcgcattaactgtcggcgttgtgacaagaccgtttaccttcgaaggacgcaaaagacagcttcaggctgcaggcggaatctcggcaatgaaagaagcggtggatacactgatcgtgatcccgaacgaccgtatccttgaaattgttgataaaaacacaccgatgcttgaagcattccgtgaagcggataacgtacttcgccaaggggttcaaggtatttctgacttgattgctacacctggtcttatcaaccttgactttgctgatgtgaaaacaatcatgtcaaacaaaggatctgctttgatgggtatcggtattgctactggggaaaatcgcgcggcagaggcagcaaaaaaagcaatttccagcccgcttcttgaagcggccattgacggtgcgcaaggtgtcctcatgaacatcactgggggaactaacctcagcctatatgaggttcaggaagcagcagacattgtcgcttcggcatctgatcaagacgtaaacatgattttcggttctgttattaatgaaaatctaaaagatgagattgtggtgacagtgattgcaaccggctttatcgaacaagagaaggacgtgacgaagcctcagcgtccaagcttaaatcaaagcatcaaaacacacaaccaaagtgttccgaagcgtgagccaaaacgtgaggagcctcagcagcagaatacagtaagccgtcatacttcacagccggctgatgatacgcttgacatcccgacattcttaagaaaccgtaataaacgcggctaatgtaaaggacaaaatcgttttcgattttgtccttttttgtttttctcttcacactttccttcttataaagtctttttccctattgcttccttcgcttagtaacaaaacagataattagacctatttatttttgtgacatttctatcattttcatatatatggaaattgaatgacatgaaacgacaatatctgtaattcagattgtctacagttaatatacagcgatgttctgacaaaccattcattattaaaaggagggacgacactttttttaaaaagcatgttgaaaaagggggatgaaaatgaagaaaaaaacgaaaaacagactcatcagctctgttttaagtacagttgtcatcagttcactgctgtttccgggagcagccggggcaagcagtaaagtcacctcaccttctgttaaaaaggagcttcaatctgcggaatccattcaaaacaagatttcgagttcattaaagaaaagctttaaaaagaaagaaaaaacgacttttctgattaaatttaaagatcaggctaacacagaaaaagcggcaaaagcggctgttaaaaaagcgaaatcgaagaagctgtctgccgctaagacggaatatcaaaagcgttctgctgttgtgtcatctttaaaagtcacagccgatgaatcccagcaagatgtcctaaaatatttgaacgcccagaaagataaaggaaatgcagaccaaattcattcttattatgtggtgaacgggattgctgttcatgcctcaaaagaggttatggaaaaagtggcgcagtttcccgaagtggaaaaggtgcttcctaatgagaaacggcagctttttaagtcatcctccccatttaatatgaaaaaagcacagaaagctattaaagcaactgacggtgtggaatggaatgtagaccaaatcgatgctccaaaagcttgggcacttggatatgatggaactggcacggttgttgcgtccattgataccggggtggaatggaatcatccggcattaaaagagaaatatcgcggatataatccggaaaatcctaatgagcctgaaaatgaaatgaactggtatgatgccgtagcaggcgaggcaagcccttatgatgatttggctcatggaacccatgtgacaggcacgatggtgggctctgaacctgatggaacaaatcaaatcggtgtagcgcctggcgcaaaatggattgctgttaaagcgttctctgaagatggcggcactgatgctgacattttggaagctggtgaatgggttttagcaccaaaggacgcggaaggaaatccccacccggaaatggctcctgatgttgtcaataactcatggggagggggctctggacttgatgaatggtacagagacatggtcaacgcctggcgtgcggccgatattttccctgagttttcagcggggaatacggatctctttattcccggcgggcctggttctatcgcaaatccggcaaactatccagaatcgtttgcaactggagcgactgatatcaataaaaagctcgctgacttttctcttcaagggccatctccatatgatgagataaagccggaaatatctgcaccgggcgttaatattcgttcatccgttcccggtcagacatatgaggatggttgggacggcacatcaatggcagggccgcatgtatccgctgttgctgcactgctgaaacaggcgaatgcctcactttctgttgatgagatggaggatatattaaccagcacggctgaaccgctcacggattcaacatttcctgattcaccgaataacggatatggccatggtctggtgaatgcttttgatgctgtatccgctgttacagatggtttagggaaagcggaaggacaagtttctgtagagggggatgaccaagagcctcctgtctatcagcatgagaaagtaactgaagcttatgaaggtggtagcctgccactgactttgacagctgaagacaatgtgagtgtgacatctgtaaagctgtcctacaagcttgatcaaggtgaatggacagaaataacggctaaacgaatcagcggtgatcatctaaaaggaacgtatcaggcagagatcccagatataaaaggaactaaactaagctataagtggatgattcacgattttggcggtcatgtcgtttcgtctgacgtatacgatgtaacagtgaaaccaagcatcacggcgggatataagcaggactttgaaactgcacccggcggctgggttgcgagcggaacaaataataactgggaatggggagttccgtcaactggcccaaatacagcagcatccggagaaaaagtatatggaacgaatttgacaggaaattatgccaactcagcaaacatgaaccttgttatgcctcctattaaagcacctgattcaggaagtctgttccttcaatttaaaagctggcacaatttagaggatgattttgattacggctacgtttttgttcttccggaaggtgaaaagaattgggagcaggctggtgtctataacggaaagacatcaagctggacggacgaagaaattgatttatcggcttataaaggccaaaacattcaagtgatgtttaaccttcaatctgatgaaagcattgcaaaagagggctggtatattgatgatgtagtgctttctgacaaatcagccggaaaaacagtcaaaaagaataagctgggcgtcgaaaagccgtctggaaagcaaaagaaaaagccagtaaatccgaaaaaggctaagccatctgcaaacacagcggtaaaacatcagaacaaggctatacagcctcaagttttgccgctcagggcacaagtcagtgtagtggaaacaggaaaatcaacatattcagatcaatccacagggcagtacacgctgaagcacaaagcgggagactatacgcttatggcagaagcatatggttatcagtcgaaaacacaaaaagtatctttaaagacggatcagacgacacaagctaattttacgttagaagagatgaagaagggcacattaaaaggcatggtcatcaataaaacgacaggagagccggtaacaggcgcttccgtttatgttgtagaggatgctgctgtggaaccggctatgacaaacgacaaaggtgaatatacgctggaggcctatgaaggcgcttatacgattaaagtcgctgcaccgggttattacagtgatgaattttccgttgagttaaaaggtgatgttacaaaagaaactgcattgaagcctttcgtcggttatccgggtgaaattgcatatgatgacggaacagcggagaatgccaattcctattttgctgccggtaacggatgggcggtaaaaatgacgctcgctgacggcaaggacaaaggcatgcttacaggagggctgttcagattctgggatacagagttcccagatccgggcggcacagagtttaaggttgaggtatacgatgccacaggaaaagacggagcaccgggcaagaaaattgcagggccatttaacgctgaagctcttcgcaatggcgagtggactaaggtagatctcagttcaaaagggattatggtcgatagagacttttatctcgtatatatccagtcaaaacctgacccgtattcacctggactggcaatggatgaaaccggcaagaattccggccgcaactggcagtatataggtggacaatgggagccgggtgacgaagcagacggcaactatatgattcgcgcattagttaattatgaagctgctgtacctgagattacttcaccgacagacaaatcatacacaaataaggatagcgtcactgtaaaaggaaacgcttctcctggcacaacggtacacatttataatggagagaaagaagcaggagaaacgaaagctgctgcggatggcacgttccatgcaggcatcatactcaacaagggtgaaaatgagctgacggcaactgcatcaactgacaacggaacaacagatgcctccagcccaatcacggtcacgcttgatcaagaaaagcctgaattaacactggacaatccaaaggatggcgggaaaacaaataaagaaacgctgactgtcaaaggggctgtatccgatgacaatctgaaagacgtcaaggtgaatggcaaaaaagcaacagtagctgatggttcatactcagcccgtattcttttggaaaatggaagaaatgaaatcaaggtaattgctacagacttggcaggcaacaaaacgacgaaaaagacagtcattgatgtgaactttgacaagcctgtcatttccggcttaattccgggagaggataaaaacttaaaagccggtgaatctgtgaaaatcgctttctcaagcgctgaggatttagatgcaacgtttaccattcgtatgccgctgacgaatgcaagagcgagtgtgcaaaatgccaccgaactcccgttaagagaaatctctccggggagatatgaaggctattggactgccacttcttctattaaagcaaaaggagcaaaagtagaagtgatcgtccgagatgattatggaaatgaaacaagaaaaactgcgaatggaaaacttaatatcaacacagaaaattaagtggaaaaaagctgccgtcattggcagtttttttatatcctctcattatacttcctcgacaaattaagcagatttccctgaaaaattgtattttcctctcaacattaattgacagactttcccacagagcttgctttatacttatgaagcaagaaggggaacagcgtgaggcaagaaagaaaggagtcagatgtgaaaatctatttagatgtcatttggctgttaaacttttgttttgatgcacttttgcttttgctcacggcatttattttaaaacggcatgtaaaaaaaagaagactggtaggcggagcgttcatcggttccagtattgtccttttgatgtttactcctttttcgccgattgttgaacatccggctgggaagctagctttttcagttgtgattgtggtggtgacatttggctttaaaagatttcggtttttctttcaaaatttgttttccttttattttgccacttttttaatggggggaggaattatcggagcccattctttgctgcagtcaaattctattgttcaaaacggtgttatgattaccaatcaaacagggtttggagacccgatcagctggttgtttattgttggtggctttccagcattatggtttttttctaaaagaagaattgaagatattgaaacaaaaaacattcaatatgaggaacgagtcagcgtgcaggcagatttgggcagccaaacacttcatgtcagaggcctgattgattccggtaatcagctgtacgatcctcttacaaaaacaccggtaatgatcatttacattgataaattggagccgattttcggaacagccgaaacgatgatcattcgaaacacagacccattggaagccatcgaacagctcgatgattcctttcgctttttagataaaatgaggttgattccatacaggggagttggtcagcaaaatcaatttttattatgcgttaaaccggatcacgtaacgattatgacaaaagaagaaatgatttctgcagataaatgtttaatcggcatcagcacaacaaagctgtcggcagatggagagtttgacgcgattattcatccgaaaatgctttcgggcaaggctgtcaaacacgtttcataatgttcgcaaatgtccgttacttatcatactcaaacggcgtgacatttagaagggagaggaagatgaaaaaactgaaattacggttgacgcacctctggtataagctgctgatgaaacttgggctgaaaagtgatgaagtctattacataggcgggagtgaagccctgccgcctccattatctaaagatgaggagcaggttttgttaatgaagctcccaaacggcgatcaggcggcgcgcgccattctaattgaacgcaatttgcgtctggtcgtatatatcgcccgtaaatttgaaaatacgggaattaatatagaggatttaatcagcatcggtaccatcggtctaatcaaagctgtgaatacattcaatccagaaaagaaaatcaagcttgctacctatgcctcccggtgtatagaaaatgaaatcctgatgtatttaagaagaaataacaaaatccgttcagaggtttcctttgatgaaccgcttaatattgattgggacggcaatgagcttttgctttctgatgtgctcggcactgacgatgacatcatcactaaagacatagaagctaacgtcgataaaaagcttttgaaaaaggcgcttgaacagcttaatgagagagaaaagcaaatcatggagctgcggtttgggcttgtcggtgaagaagaaaaaacccaaaaggatgtagcggatatgatggggatttctcagtcttatatttcgcggcttgagaaaagaattataaaaagattgagaaaagagttcaacaaaatggtgtaaaaaattttatggttagaaccccttgattttacagggatttcctgatttcgacagtttttcggtctgagtgcagtgcatatttttcccacccaaggagatacttaacgttgtacagcagctcctgtagggagggaaaaaagtgtcgagaaataaagtcgaaatctgcggggtggatacctccaaattaccagtactcaagaatgaagagatgagaaagctgtttaggcagctgcaggatgaaggcgatgattcagcaagagaaaagcttgtaaacgggaacttgcgtcttgtcttaagtgtcattcaacgatttaataacagaggggagtatgttgatgacttatttcaagtcggctgcatcggactaatgaaatccattgataattttgacctaagccacaatgttaagttttcaacatacgctgtacctatgattatcggagagatccgcaggtatttacgcgataataacccgatccgtgtctcaagatcactccgggacatcgcttacaaggcgcttcaggtaagagagcggttaatcagtgagacaagcaaggagccgactgcagaagacatcgcaaaagttcttgaagtaccgcatgaggaaattgtatttgcgcttgatgccatccaggatccggtttctctatttgaaccgatctataacgacggcggagacccgatctatgtgatggaccaaatcagtgatgagcgtaatacagattcacaatggattgaagagctggctttaaaagagggcatgagaaggctgaacgatagggaaaaaatgattttgagaaagcgattcttccaagggaaaacccaaatggaagtcgccgaggaaatcggaatttctcaagcgcaggtgtccagacttgaaaaagcggctatcaaacaaatgaataaaaatattcatcaataatgaaaagcctttaaaacgatgttgttttaaaggcttttctattgattatggatggtttacgttttggaaaaagtaaggtatcctagttcgtacaaagttttatgaaaattaaaacaattataaaaggcaataaagaggaggaccacgatgattttgcagcttgacaatgtctcactaaaacggaatgggaaatggatactgagagatattgattggaaggtggaagaaaaggaaaattgggtgctttacggcctaaatggcgccgggaagacagcgctgttaaatatgctttgctcatattattttccaacatcaggcgagatgcaggtgcttggccatgaatttggcaaaacagagcttggggaaaagctcagacgtaaaattggcctcgtctcagctgctcttcagcaaaaattgtacccggcagattcagcctttgaaattactttgagcggagcttacgcttcgattggtttatatgaaacgccaagtaaggaaaccagggaaaaagcgattggtttgttagaggacttgggagcaattgaatatgccgatcgccgctatgaaaccctttctcaaggggaaaaacaaagagcgttgattgctagagcactaatggccgatccggagttgctgatactggatgaaccagtcacagggctggattttattgcccgggaaaagctgttagatacgattacatacattgcaaacaaagaaaatgcaccatctatcctttatgtgactcatcatgctgaagaaattttgcctgtctttgataaagcccttttattaaaacagggagaggtctttggatccggagaaataaaggaaatgcttactgatcaaatactttccgctttttttgataccccaatccatgtattatggaatcaggatcggccgtttttaacaagagctgagccgataacgaatgcctgacaaacatatatagattcatcctaggggtgctttgcgaagctgagagagactttgtctcaacccttttgacctgatctggatcatgccagcggagggaagcggtgaaaagcggagtacatcggactccgtttgtttttattaagccgtttcatcacatttgaaacggcttttttgattttaaagaataggagcggatttacattggatcaacaaatagactctttgcaaaaaaaagtggaagaacataaggaggagcttattcagcttgcgaaaacgctgatttcttatcaaacacctgctccgcctgcaagaaatacagagggcattcagtcatggattgcgggatatttaaatgaattgggattctcgatcgacaaatgggatgtgtaccctggagatcccaatgttgtagggaagctaaaaggaacagattcagcagattattatagcctgattatcaatggccatgtagatgtggcagaggtaaaagaggatgaagaatgggagcatgatccatttcatccaattgaaaaaaacggtctcttaatcggtcgaggcgcttccgatatgaagggcggaatggcgtgtgtgttgtttgctgtcaaattaattcgtgaagccggcattgagcttccaggtgatctgattctgcaatcggttattggggaggaagttggagaggccggcacacttgaatgctgcaagaggggctaccacgctgattttgcaattgtcgcggatacgagcgatatgcatattcaaggccaaggcggtgtcattacaggctggatcgaaatcaaaagcagtcaaacatttcatgatggaacgagacggaatatgattcacgcaggcggaggaacattcggagcaagcgcaattgaaaaaatggcgaaaatcattgcggggctcggtgaacttgagcgccactggtccattatgaaaagttatcccggttttaaaccaggcacaaatacgattaatccggcagttatagaaggcggcagacatgcggcttttatagcggacgaatgccggctgtggatcacagtccatttttatccaaatgaaacccatgaccaagtggcagcggaaatagaagattacgtcaatcggctgagtgacagtgatatttggcttagggaaaaccgccctgtattcaagtggggaggctcatctatgatagaagacagaggagaaatttttccggcattggaagttgactctggccacccaggcgtcttagcgctaactgcctctcatcagaaagtgaaacgggagtgtccaattattgacgtttctcaatcagttacagatggcggatggctgtatgatgccggtattccatgcgtaatatacggtcctggagatctgcacaatgcacactctgtgaacgagaaggtatcgattgagcagctagtagagtatacaaaaattatactcgattttatcatcagctggtgcagccggaaaaaagaacaatgacatgaaaatttcttcttgctgacaaggttcagcctgcccgttcatatacttgaacaaaaggacggaaaaaggacgtgatggaatgatcagcatttcagaatttcaggtaaaggatgtcgtcaatgtctcaaacggaaaaaagctggggagtattggtgatattgatatcaatgtgaccactggaaaaattcaggcgatcatactcggaggaaatgggaaagttctcggattttttggaaaagaagaggaattggtcattccatggcgaaatatagtaaaaatcggggaagatgtaatcttagtccgattaagtgaaccacatgcataaacctgcttgtctgccgcagattggcaaatgccggaagtctcgattcttccggcacatttcatttagaaatatgcaaatcggcgctcaacgaatgcagtaagatgtggtaaaataagtgggaaattccgcttttttaaatgtttgtcgaaaggttggatcatcatgaatacatatcacccattcagtcttaccacaccctcgacactcatgatacaagactgggttcaaacgaatcaaaacaacaaaaaagtcattgccggatttacgacaaaaaacggcggtgtcagccaaaagccttttgaatcgttaaatacaggattgcacgttcatgacaaagatgcagatgtagttaaaaatcgtgaatatattgccgatatgtttaatactgatttgcagtcttgggtattcgctgatcagacacatgataatcgcgttcagaaagtgacgcagagggataggggaaaaggcgcccgtgagtatcacacggctctaaaagcaacggacgggctatatacaaatgaaaaaaatgtatttttagcattatgctttgctgattgtgtgcctcttttcttttatgatccggttaagtcgcttgtcggagtcgcccatgccgggtggaaaggcaccgtcaaacagattggcagagaaatggtgaagcaatggactgagaaggaaggttcaaatccctcagatatttacgctgttattggcccgtctatcagcggagcatgctatacggtagacgaccgcgtcatggatgctgtccgcgcattgccggtttcagcagaccttgccgttaatcagacggcaaaggcacaatatcagcttgatctgaaagagctgaaccgtcttatactgatggacagcggtttggcaagtgaacaaatttctgtcagcggtttatgcacggaaagcgagccgtctcttttctattctcaccgccgcgatcaggggaaaactggacggatgatgtcctttatcggaatgaaggaggcataaaagatcttgcgtgttgttgataatttacgacatataaacgaacgaataaacgaagcatgtaacagatcgggccgcagctccgacgaagttacggttattgcagtcacaaaatatgtatcacctgaaagagcacaggaggcagtagatgctggcatcacctgcctcggagagaatcgggatgcggaactgctccgcaaacaggaattgatgaaagggaatccggaatggcattttatcggcagtctgcaatcaagaaaagcaaaatctgtcgtcaatgcggtttcctatatccattccctagaccggctctcattagcgaaagaaattgaaaaacgggctgaaggtactgtacgatgctttgtgcaggtcaatacctctcttgagccttctaaacatggcatgaaaaaagaagaagtcattccattcatacaggagctttccggtttcgaacatatccttgttgccggactgatgacaatggctccgctgactgatgatcaagatcagatcagaagctgtttcaggtcgctgagagaactccgtgaccaggttcagaagctgaaccagccgaacgctccgtgtactgaactgtcgatgggcatgtcaaatgattttgaaattgcaattgaagaaggagctacttatattagaatcggctcatcgttagtcggaaatgaaacagggggtgtacagcaatgagtatgaaaaataaactgaaaaactttttctcaatggaagatgaagaatacgaatatgaatatattgagacagagcgggaatctcatgaggagcatgagcaaaaagaaaagccggcttatacggggaataaaccttcgggcaaacagaatgtagtgagcttgcaaagtgttcagaaatcctctaaagtggtgttgagtgagccgcgcgtttatgcggaggcgcaggaaatagccgaccatttgaagaaccggcgggcagttgtcgtcaatcttcagcggatacagcatgaccaggcgaagcggattgttgactttttaagcggaaccgtttatgccattggcggcgatattcaaagaatcggctcagatattttcctctgcacgcctgacaacgtagatgtatcaggcacaatttctgagctcatatctgaagacgaacatcagaggtggtaaagcgagatgatcctttatcaagttttttcggttttaagcttattaatcacaatatactcatttgccctgatcatatatatttttatgtcatgggtgccgagtacgagggaaacagcagtcggacgttttttagcttcgatttgtgaaccatatctcgaaccattcagaaaaatcatccctccgattgcaatgctggatatttcaccaatcgtagcaatacttgtgcttcggtttgcgacaaccggcttgtggggactttatcgcatgattgcgttttaatgtgacagtttgataggggcttggcagcagccaagcctctttacatagaagggaaagacgatgagcgatatatatcagcacttcagaaaagacgagcgggcctttattgatcaggcgctcgaatggaaaagaattgtccaggagcagtaccggatgaagctgaccgactttttagatccccgagagcaggtcatcctctctgctgttacgggacaggctgatgtcgggcttgctttttccggcggctatgacagagcggagcgaaaacgggcgattctgtatccagagtacattactccggaagaatcggattttgaattgcaggcgtttaacgtccgttatgctgacaagtttgtctcagtagatcatcgttctctgcttggtgcattaatgggcataggattaaagcggcaaaaattcggtgacatcgtgttttctgagacagcagtgcaattgattgtctcagccgataccgctgattttgtggctgcacagctgacccaagcaggcaaagcggcggtcagcctagagaaaattgacttgtcagaccttaacattccagcagttgatgtcgaaataagagatgacacggtttcttctttaaggcttgacgccgtctgcgcctctatgagcaggcaatcccgccagaaatcacagacgcttgtgaaaaacggccttgtgaaagtgaactggaaggtggttgaagatccttcatacatagtcgcggaaggggacatgctgtcaatcagaggttttggccggtgcagcttaacaaaaatcgaaggaaaaaccaaaaaagacaaatggagagttacgtttgaacgacaaaaatagtcggtttttcagtttttttctccatctgtgcgaaatttgttttataatgtgaactagataaccgtactgaaatgtaaaaaatggaggtggcatcatgccattaacgccaaatgatattcacaacaagacgtttacaaaaagttttcgcggatatgatgaagatgaagtaaatgaattcctagcccaagtcagaaaagattacgaaattgttctccgcaagaaaactgagcttgaagcgaaagtcaatgagctagatgaaagaatcggacactttgccaatattgaggaaacattgaataaatcaattttagttgctcaagaagcggctgaagacgtaaaacgcaattctcaaaaagaggcaaagctgattgttcgggaagcggagaaaaacgctgatcgcattatcaacgaatcgttatcaaaatcaagaaaaattgcaatggaaattgaagagctgaaaaaacagtctaaagtgttcagaacacgtttccaaatgctgattgaagctcagcttgatcttctgaaaaatgacgattgggatcatctccttgagtatgaagtcgacgctgtatttgaggaaaaggaataaattctctgattatcttgacattttcttagcttgtcgaatataatacgttcataaattcagatgaaaaaacggttgaaagggacagtcatgtttccttcaggccttcatagcgacccggagatggtgagagtccgggatggccggaatcatgtagatcagccctttagtttccttgctgaactcacagtaggttaggacgttcatcacgttacgatgctcaagaggaaaaagtgtatgctggctttttctaaaagggtggtaccgcgagataagctttctcgtcccttatgggatgagagggctttttttattttctgaaaaaatgcagtggaggaatgaaaatggattttaaagacacgctcttaatgccgaaaacagatttcccgatgcgtggaaatttgccaaaccgtgagcctgacattcaaaaaaaatgggaggaagaggatatctaccgtcttgttcaggaacggacgaaagaccgcccgaaatttgttttacatgacggacctccgtatgcaaacggcgacatccatatgggccatgcacttaacaagattttgaaagacttcattgtccgctataaatcaatgagcggctacaacgcaccgtatgtgccgggctgggatacacacggattgccaattgaaacagctctgacaaaaaacaaaaaggtcaaccgcaaagaaatgtcagtagcggaattccgcaaactatgcgaagagtacgcttggaagcaaatcgagggacagcgtgagcaattcaaacgtcttggtgtccgcggtgactgggaaaacccatacgtgacattaaaaccggaatacgaagcgcagcaaatccgcgtatttggtgaaatggcaaaacgaggctacatttacaaaggccttaaaccggttaactggtcaccttcaagtgagtctgctctggctgaagccgagatcgaatatcaagacaaacgttcagcatctatttacgtcgcttttggtgtaaaagacggaaaaggcgttcttgaaaacggcgagcgcatcattatttggacaacaacgccttggacaattccggcgaacctcggaatttcagtgcaccctgatcttgagtacagcgtgattgcagtaggtggtgaccgctttgtcgtagcaagtgcattagtcgaaaatgttgcatcggcatgcggatttgatcagtatgaagtgacaagaacggtcaaagggaaagaccttgagaacattatcgctgaacacccgctatatggcagagactctctcgttatgcttggtgaacacgtaacaactgatgccggaacaggctgtgttcatacagcgccaggacatggggaagatgactttatcatcggccaaaaatacggtttagatgtgctttgcccggttgatgaaaaaggtgtaatgacaagcgaagctcctggctttgaaggcatgttctatgatgatgcaaacaaagcgatcacacagcagctcgatgaaaaaggcgcacttgtgaagcttgaattcattactcactcttatccgcatgattggagaacaaaaaaaccaaccattttcagagcgacagcgcaatggtttgcgtctattaaagatttcagatcagacctgctggatgccattaaagaaaccaaatgggttcctgaatggggcgagcagcgtttgcacaacatggttcgggaccgcggagactggtgtatttcgagacagcgtgcgtggggtgtgccgattccggtattttacgctgaaaacggagaaccgattattacagatgaaaccattgaacatgtttctgaattgttcagacagcacggatcaaacatttggtttgaaaaagaagcaaaggatcttcttccggaaggctttacgcatcctggcagcccgaacggcacatttacaaaagaacaggatatcatggatgtttggtttgattcaggctcttcacatcaagcagtgcttgaagaacgtgatgacctcgttcgcccggctgatttatacctagagggatctgaccaatatcgcggctggtttaactcttctctttctacagcagtagccgtaacagggaaagcgccgtataaaggtgtgctaagccatgggttcgcactggatggagaaggacgcaagatgagtaaatcaatcggtaacgttgttgttccggctaaagtcatgaaacagcttggtgccgacatcttaagattatgggtatcttcagtggattatcaggcggacgttcgcgtgtctgacgccattctaaagcaggttgcggaagtatatcgtaaaatccgcaacacgttccgtttccttcacggcaaccttttcgattttgatccaaaaacaaatgcggtggctgtcgaagatcttcgtgaagtggatcagtatatgctgattaagctgaacaagctgattgataaagtgaaaaaagcgtatgatgagtacgaatttgcggttgtgtatcacagcattcataatttctgcacaatcgaattgagctcattctaccttgattttgcaaaagatattgtctacatcgagcatgcggatcatccggatagacgcagcatgcagacagtattctatgaaacgcttcttgctttagtgaagctttcagcgcctatccttccacatacggcagacgaattgtggtctcatttaacatttgttgaagagcagagcgttcagctgacagatatgccggaaacaatcgcggttccaaacagtgaagtgactgaagaaaaatttgaccgttttatggctcttcgtgatgacgtgctaaaagcattagaaactgcgcgaaatgaaaaaattatcggtaaatctttggaagcaaacctgaaattgtatccaaacaaagaaaacaaagagctcttggcttccataaaagaaaacctttctcagctgtttattgtgtctgaactgacaatcagcgaagaaaatgatgcgccgaacgatgcgcaaagctttgcgacgggtaaaatcgctgtcgagaaagcggaaggcgaaatgtgtgagagatctcgtgtgatttcaaaagatgtaggggcaaatccgaaatatcctacactttcattacgcaacgctgaaatcgttgaaaaatactatcaaaaataatgaaaagggcccggcgtaaaagccgggctttttttgtgccaagagtgacatcctttagaacggcaggaaaaatcttatgggctttagatcatcattcataggcaacaataaaggtactacgttaagagcaggagttgtgaagaatgaatgatcaactgaccgcaatttatacggaacttcttctgatgaaagaagaattacagtcgagattatttgagtattcttgctttcaggtttctacaagcccgcaagcagcaatcaatcataaacaaaaagcaactctgatctatcatattaaagaagagcttcaagacgttctccttgcattgtccaaaatcgaaaacggcacattcggatactgtgaagaaaccggggctcccattcctctttcaaagctggcagtgctgccgacggcccgaacagcaaacgattttctttattctgtccaatttgagaaaaaaacgcttccgatatggaaatcaacggatatcgaatatggtcaggcactgtatgaataacagtgtctggccggttattatgcctgatatttctttactccagtgctttttattgataaaatgcataatggattaaagtaaccgtaaactggaggaacgtttgtgctgtattatatgattgcactacttattattgcagccgatcaattgacaaaatggctagttgttaagaacatggaacttggccaaagcattccgatcattgatcaggtattctatatcacctcccatcgcaatacgggtgctgcatgggggatattagcgggtcagatgtggtttttctacctcataacaaccgctgttattattggtattgtttattacatacagcgttatacaaaaggacaaaggcttcttggcgttgctctcggacttatgcttggcggtgccatcggcaactttatcgatcgggctgtcagacaggaagttgtggattttatccatgttattattgtcaattacaattacccgatatttaacatcgcggactcttcattatgtgtcggcgtaatgcttttatttatacaaatgctgttggacagcgggaaaaagaaaaaggagcaatagcatgaatcaaattgatataaccgcttcagaagaacaaaaaagtgagcggattgataaatttttggcatcgactgagaatgattggtcaagaacccaggttcagcaatgggtaaaagacggacaggttgtcgtgaacggaagcgcggtgaaagcgaattataaaattcagccgggtgatcaggtgaccgtcactgtacccgaaccggaagcgctcgacgtcctggcagagcctatggatctggatatttattatgaggaccaggatgtgctggtcgtcaacaaacctcgcggaatggttgttcacccagcacccgggcatcttacgggcacacttgtaaacggccttatggctcattgcatagacctttccggaataaatggtgtgatgcgcccgggtattgttcacagaatcgataaggacacgtccggtttattaatggtggcgaaaaatgatatggcgcacgagtcacttgtaaaccaattggtcaacaaaacggtcacgcggaaatatacggcagttgtccacgggcttatttctcacgatgatggcacaattgacgcgccgatcggacgagataagaaagaccgtcaaagcatgactgtgacacgtgatggcaaaaacgctgtcactcattttcatgtactagagcgttttcaggattttacgttagtggaatgccagcttgaaacagggagaacccatcaaattcgtgttcatatgaaatatatcggcttcccattagcaggcgatccgaaatacggcccaagaaaaacaatcgactttaatggccaagcgcttcacgcgggagttttaggttttgaccatccacgaacaggagaatatgtcgaatttgaagcgccgcttcctgaggatatggcagaattaatcgaaaacctcagaaaaaacggttgacagagggtttcttttctgaaataataaacgaagctgaatagattctttaaaacagtccagagaggctgagaaggataacggatagacgggatgcgtgtataggcgcgcaccttgtcctaaaacccctctatgctctggcaggaggggttttttcttctatatgaactgtgaggtgtcacacattgaatcaaaaagctgtcattctcgacgaacaggcaatcagacgggcgctgaccaggattgctcacgaaatgatcgaacgcaataaaggaatgaataactgcattcttgtcggcattaagacaagagggatttatctggcaaaacgccttgcggaacgcattgaacagattgagggaaatcctgttacagtcggtgaaattgatattactctttacagagacgatctttctaaaaaaacgagcaacgatgaaccgcttgtaaaaggtgcagatattccggtagatatcacagatcaaaaagtcattctcgttgatgatgttctgtataccggaagaacagtcagagcaggaatggatgcgcttgttgatgtaggcagaccttcctccattcagcttgcagtgcttgtggacagaggacaccgggagctgccgatccgagcggattatatcgggaaaaacatcccgacatcaaagtctgaaaaggttatggttcagcttgatgaggtagaccaaaacgatctcgtcgccatttatgaaaacgaataatagatcacctttttaagggcaatccagagaggttgcaaagaggtgcacaacaaaggcccaaaaagcattcggcaggtctttgtatgcctctttgcgtaaaaaagcaaagaggtttttttatacagtcattgagtcatcctaaaatgaaagtcaacaatcagggggaaatcatcatgagtaagaaaaaagtaaatttaggggtcagggatgtcccgacacctttctcttgggtttcattcagccttcagcatttgtttgccatgtttggctcaaccatcttggttccgaagctcgtcggaatgagtcctgctgtggcgttggtgacaagcggcatcggaacactggcgtaccttcttattacgaaagggcaaattccggcgtatctcggttcatccttcgcctttatttctccgatcattctggtaaaagcgaccggcgggccgggagcggcaatggttggagcgtttcttgcagggctggtgtacgggctgattgccttattgatcaggcagcttggaacaggatggctgatgaagattctcccgcctgtagtcgtagggcctgttattatcgtcatcgggctgggactggcaagcactgcggtaaacatggcgatgtatgctgatccaaatgcgagtgagttggtctacagcttaaagcactttagtgtcgcaggagttacgctggcaatcacgattatttgtgcgattttcttacgaggatttttaagcctgattccggttctgatcggaatcatcggcggatacctgtttgcccttactcaagggattgtcaacttccagccggtgcttgacgcgaaatggttcgcagtgcctgaatttatcattccgttcaaagattattcaccatcagttacactcggcatcgcagccgcaatggttcctgtcgcatttgtcacaatgtcagagcatatcggccaccaaatggtgctgagcaaggttgtcggacaagacttcattaaaaagccaggtcttcatcgctctattatgggtgacagtgtggcgacaatcctcgcttccctgatcggcggtccgccgacaacgacttacggagaaaacattggcgtgctggccatcacaagagtattcagcgtctttgtcatcggaggagcggcagtgattgcctgttgcttcggctttatcggcaaaatttcagcgctgatcagttcagtgccgtcagcggtcatgggaggcgtctccttcctgctgtttggaatcattgcttcaagcggtctgagaatgctgattgacaacaaaattgattatgaaaacaacagaaacctcattattacatcagttatccttgtcatcggtgtaggaggcgcttttatccaagtgtctcaaggcggattccaagtgtcaggaatggcgcttgccgcaattgtcggtgtcatcttaaacctgattcttccgcaggcgaaggaagagcagaaagacacatctgaacaacatcatatctaaaaccttttaatgaaagtccagagaggcttggaagggttatgaagagaagggagcttcaatgctgccctctatttaaccataccccgagtctatcttagaccggggtttttttcagccttaagttgaaaagagaggggaaagaacatgaagcatttaacgacgatgagtgaactcggcactgaggaaatcaaagatttgcttcaaacagcacaagaccttaaaagcggaaaaacagacaatcagcttacaggaaagtttgccgcaaacctgtttttcgaaccgagcacgagaacgcggttcagctttgaggtcgcagaaaaaaagctgggcatgaatgtgctcaaccttgatggaacaagcacaagcgtgcaaaaaggcgaaaccttatatgacacgatccggacgctcgaatcaatcggtgtggacgtctgcgtcatcaggcacagtgaggatgagtattatgaagagcttgtcagccaggtgaacattccgattctgaatgcgggagacggatgcggccagcatccgacacaatcactgcttgatttaatgacgatttatgaagagttcaatacgttcaaagggcttaccgtctccattcacggcgacatcaagcatagcagagtggcaaggtcaaatgcggaagtgttgacaagattgggtgcccgggtcctattttccggcccttcggaatggcaggatgaagaaaatacattcggtacgtatgtctcaatggatgaagcagttgagtcttccgatgttgtcatgctgctgcgcattcaaaatgaacgacatcagtccgctgtcagccaggaaggctatttaaacaaatacggcttgaccgtagaacgggctgagcgtatgaagcggcatgcgatcatcatgcatcctgctccggtaaacagaggagtggagattgatgacagcttagtagaaagcgaaaaatcaagaatcttcaagcaaatgcaaaatggcgtatttatcagaatggcagtgatacagcgtgccttacaaaccaatgtgaaaagaggagaagcagcgtatgtcatatctcattaaaaacggctggatactaaacgaaaatggtgaaaaaacagaagcggatatccgagtgactggagaaaccatcaccgcaatcggcaagcttgatgcaacggataatgaaacggtaattgatgcgaaaggtttgctcgtttcacctgggtttgttgatctccacgtgcatttcagagagccgggcggagagaaaaaagaaactattgaaaccggggccaaagcggcggcacgcggcggctatactacagtagcagcaatgccgaatacgcggccggttcctgatacaaaggagcagatggaatgggtgcaaaacagaattaaagaaacatcatgcgtcagagttcttccatatgcatccattacgatcaggcaaatcggcgatgaaatgacaaactttgaagcattaaaagaagccggggcatttgcttttacagatgacggtgttggtatacagacagcaggtatgatgtatgaagcgatgaaacgggcagctgcaattgacaaagcgattgttgcacattgcgaggacaactccttaatttacggaggaagcgtacatgaggggtcattctccaaagcgaacgggctaaacggcattccttctgtgtgtgaatcggttcatattgcccgcgatgtgctgctggctgaggcggcaaactgccattatcatgtatgccatatcagcacgaaagaatctgtcagagttgtacgcgatgcgaaaaaagcgggaatcagagtgacagcagaagtgtcgccgcatcatttgctgctttgtgatgaggatatcccggggctggacacaaactataaaatgaatccgccgctccgcagtgcagaagacagagctgctttaattgaaggtcttttagacggaacaattgattttatcgcaacagaccatgcaccgcatacggaagaagaaaaaaacacagaaatgaaactggcgccattcggaattgtcggcttagaaacagcattcccgcttctttacacacactttgtcaaaaatggcagctggtcgctgaagcagttgattgactacatgacaatcaagccatgcgaagcgttcggtctcccatatggaacattacaaacggggcaagctgcggacattacgttaatcgatttagaaaaagaagcagttatagacaaagacacgtttttatcaaaaggaaaaaatacaccattcaacggcatcagctgcaccggctggccggtcgctacaattgcggcagggaagcttgcttatgaagaggggagacttgtcaaatgaagagacgattagtactggaaaacggagcggtattcgagggagaagccttcggaagcttagaacacaacatgggagaagtcgtttttaatactgggatgacaggctatcaggaaattttatctgacccttcttactgcggacagatcgtaacattaacatacccgcttatcggaaattacggcattaaccgtgatgattttgaatccattaccccttttgtaaaagggctgatcatcaaagaattatgtgagctgccttccaactggcgttcagcatacaccttagacgagtatttaaaaatgaaaaacattcccggactccaggggattgatacaaggaagctgacaagaatgatccgcacggcaggcgcgctaaaaggaacattcgcttcatctgatgaagatatcgaagcagtgctgaaaagactgaacgaaacggaattgccaagaaatcaagtatcccaagtatcagcaaaaacagcatatccgagcccgggaagaggcaaacgcatcgtcttggttgacttcggcatgaaacacgggattctaagagagctgaacaaacggaaatgtgacgtcatcgttgtgccttacaacattacagcggaagaggtgcttcagctgaaaccggacggtatcatgctttctaacggacctggagacccgaaggatgtgcctgaagcgattgaaatgattaaaggtgttcttggaaaagtgccattattcggaatatgtcttggccaccaattattcgcgctggcgtgcggggcgaatactgaaaaaatgaaattcggccacaggggctcaaaccacccggtaaaagagctggctacaggaaaagttgccttaacatctcaaaaccatggatatacagtttcgtctatcagtaaaacagaactggaagtgacgcatatcgcaattaacgacgatacgattgaagggctgaagcataaaacattgccggcatttacggttcaatatcatcccgaagcctcacctggtcctgaggatgccaaccatctatttgacagattcatcgaaatgatcgaaacaacagagaaagaaggggaagcggtatgccaaaacgcgtagacattaacaaaattttagtaatcggatctggaccgatcatcatcggccaagcagcagaatttgactatgcgggaacacaagcctgtcttgctttgaaagaagaaggctatgaagtcatccttgtcaactcaaaccctgcaacgatcatgacagatacagaaatggctgaccgggtttacatcgaaccgctcacacctgaattcctgacacgaatcatcagaaaagagcgcccggatgccattcttcctacactcggaggccaaaccggtttgaatcttgcggttgagctttctgaaagaggcgttttggcagaatgcggcgtcgaagtgcttggcacgaaactgtctgcgattcagcaagctgaagaccgtgacttgttcagaacattaatgaatgaactgaatgaaccggtgcctgaaagtgagattatccactcccttgaagaagcagaaaaattcgtcagtcaaattggattccctgtcattgtccgcccggcatatacattaggcggaacaggcggaggtatctgctcgaatgaaacagagctaaaagaaatcgttgagaacggcttgaaattaagcccggtacaccaatgtcttcttgaaaaaagcatcgccggctataaagaaatcgagtatgaagtcatgagagacagccaggatcacgccattgtcgtttgtaacatggaaaacattgatccagttggaatccatactggagacagtattgttgtcgcgccgagccaaacgctcagcgatcgcgagtatcagctcttgcggaatgtatcgttaaaactgattcgcgcgcttgggatcgaaggcggatgtaacgtccagctcgccttagatccagacagcttccaatattacattattgaagtaaatccgcgtgtcagccgttcatctgctcttgcatcaaaagcaacgggatacccgatagcaaagctcgctgctaaaattgcagtcggactttcattagatgaaatgatgaacccggtgacaggaaaaacatatgcagcatttgaacctgctcttgactatgtcgtatccaaaattccgcgctggccgtttgataaatttgaatcagcaaacagaaagcttggcacgcaaatgaaagcgacaggtgaggtcatggcaatcggccgcacgcttgaagagtcattgctgaaggcagtgcgttcgctggaagcggatgtgtatcatcttgaattgaaggacgccgctgacatttcagatgagcttcttgaaaagcgaattaaaaaggccggtgatgaacgcttattctacttagctgaagcgtacagaagaggctacacggtagaagacctccatgaattttccgctatcgatgtcttcttcttgcataagctgttcggaatcgtacagtttgaaaaagaattgaaggccaatgcgggcaatacggatgtgctgagacgggcaaaagaactcggcttctctgatcagtacattagccgcgagtggaaaatgaaagaatctgagctttacagcttgagaaaacaagcggggattgcgccggtattcaaaatggtagatacgtgcgcggcggaattcgagtcagaaacgccatacttctatagcacatacgaagaagaaaatgaatctgtcgttacagataagaaaagtgtgatggtgcttggttcgggtccgattcgaatcggtcagggtgtcgagttcgactatgcgacggttcactctgtatgggcaattaaacaagcaggctatgaagccattattgtcaacaacaacccggaaaccgtttcaacagacttcagcatctcagacaagctgtattttgaaccgcttacgattgaagatgttatgcacatcattgaccttgaacagccaatgggcgttgtcgtacagttcggcggacaaactgcgattaaccttgctgacgagctttctgcacgcggagtgaaaatccttggaacttcattagaagatttagaccgtgcagaagaccgggataaatttgaacaagcgcttggagaacttggtgttcctcagccgcttggcaaaacagcgacatcagttgatcaggcggtaagcatcgcgagtgatatcggttatccggtactggtgcgcccttcctatgtacttggcggccgggcgatggagattgtttaccatgaagaggaactgcttcattacatgaaaaatgcagtcaaaatcaatccgcagcaccctgtattaattgatagatacttgaccggaaaagaaattgaagtcgatgcagtatccgacggtgaaacagtcgtcattccgggaattatggagcacattgaacgtgcgggcgttcactccggagactcgatcgctgtttatccgcctcagtctctcacagaggacattaagaaaaaaattgaacaatacacgatcgcattggctaaagggctgaatattgtcggtttgctcaatattcaattcgtcttgtcgcaaggcgaggtgtacgtgctagaagtgaatccgagatcaagcagaaccgtaccgtttttaagcaaaattacgggtatcccaatggcgaatctcgcaacaaaaatcattcttggtcaaaagctggctgcgtttggctatacagagggccttcagcctgaacagcaaggtgtatttgtaaaagcgccggtcttctcctttgccaagctgagaagagtggacattacgttagggcctgaaatgaaatcaacaggtgaagtcatggggaaagattcgacacttgaaaaggcgctctacaaagccttgattgcttcaggtattcaaatcccgaactacggttccgtgcttttaaccgtagctgataaggacaaagaagaagggcttgccattgctaagcggttccacgcgatcggctacaacattttagcgacggaaggaacggcaggctacctgaaagaagcttccattccagcgaaggtcgtcggaaaaatcggtcaggatggcccgaacttgcttgacgtcatcagaaacggagaagcgcagtttgtcatcaatacgctgacaaaaggaaagcagccggcaagagacggttttagaatcagacgtgaatcagtagaaaatggtgttgcctgcctaacatctttagatacggcagaggcgatattgcgagtgctggaaagcatgacattccgtgctgatcaaatgccggcagtcaacacaaatcaggaggcggcagtcactatatgaaaaaagcgtatttgacagtatgttctaaccagcaaattgcagaccgggtgtttcaaatggttctgaaaggggagcttgtccaagggtttacaacccctggacagttccttcatcttaaagtgagcgaagcggttacgcctcttttgagaaggccgatcagcatcgcagacgtcaactttgaaaaaaatgaagtcaccatcatttatcgggtagatggtgaagggacaagactcttgtcactgaagcagcagggagaacttgtggatgtcctcgggcctttgggaaatggctttcctgttaatgaagttcaacccggaaagacggctttgctggtaggaggcggagtaggtgtgccgcctctccaagagctgtcgaaacgcttgattgaaaaaggggtaaatgtcatccacgttttaggattccaatcggcaaaggatgtattttacgaggaagaatgcaggcagtacggagacacgtatgtggcaacagctgacggaagctacggggaaaccggatttgtcacagatgtgattaaacggaaaaatctagagtttgatatcctcctcagctgcgggccgacaccgatgctcaaggcgttaaaacaggaatatgcccataaagaagtatatctgtccatggaggaacgaatgggctgcggaatcggcgcatgcttcgcgtgtgtgtgccatacaaacgaaagtgagacatcctatgtaaaagtatgtctcgacgggcctgtatttaaagctcaggaggtggcgctgtaatgctagaggtgaaattgccgggacttgatttgaaaaacccaatcattcctgcatcaggttgcttcggttttggaaaagaattttcacgtttttatgatttgtcttgtcttggagccatcatgattaaggctacgacaaaggagccgcgctttgggaatccgacgccgcgggtagctgagactggtgctggaatgctcaatgcgatcggtctccaaaatccggggctggatagtgtgttgcatcatgagctgccgtggcttgagcagtttgatacaccgatcattgccaatgtcgcaggttctcaagtcgatgattatgttgaagtcgcagaacatatcagcaaagcgcctaatgtccatgcacttgaattgaatatttcctgcccgaatgtgaaaacaggcggaatcgcttttggcacgaatcctgaaatggctgccgatttgacaaaagcggtgaaagaggtttcggatgtacccgtttatgtgaagctttccccgaacgtggctaatatcacagaaattgccttagcgatcgaggaagcgggagcggacggtcttacgatgatcaacacactaatcggcatgagactcgatttaaaaaccggcaaaccgatattagcgaataaaacagggggactttcaggccctgctgtgaagccggttgccattcgcatggtgtatgaagtcagccaggcggtcaacatcccgattatcggaatgggaggcgtgcaaacggctgaagatgccctggaatttcttctcgcgggagcaagcgcagtcgctgtcggaacagcaaactttgtgaatccttttgcatgtccagagattattgaacagctcccatctgttttgctccaatacggctatcaatcaattgaagaatgcatcggaaggagctggaatcatgaaaaacaacctgcccatcatcgcgcttgattttgcgtcagctgaagaaacacttgcgttcttagcgccttttcagcaagaaccgttatttgtaaaggttgggatggagctcttttatcaagaagggccatctatcgtgaaacaactaaaagaaagaaactgcgagctatttttagatctaaagcttcatgacatcccgactactgtaaacaaagcgatgaagcgccttgccagtcttggagtagacctcgtcaatgttcatgctgccgggggcaaaaaaatgatgcaggcagctctcgaaggcttagaagaaggtacgccggctgggaaaaaacgtccgtcacttatcgcggtaacccagctgacaagcacatctgaacaaatcatgaaagatgaactgctgatcgaaaagtctctgattgatacggttgtgcactacagcaaacaggcggaagaaagcggactggatggagtggtctgctctgttcatgaagcaaaagccatttaccaagcggtgtcgcctttatttctgactgtcactccggggatcagaatgtcagaggacgctgcgaatgaccaagtccgcgtagcgacgcctgccattgcaagagagaaaggttcatcagcgattgtagtaggacgctcgattacaaaagcggaagacccggtaaaagcctataaggctgtcagacttgaatgggagggaatcaaatcttgaaacaaatcatcgcaaaacatctattagacatccaagctgtatttttacgcccgaacgagccgttcacatgggcaagcggcattttatcaccgatctactgtgacaaccgccttacgctatctttcccagaggtcagaaacgatgttgcttcaggtatcagcaagcttgtcaaagatcattttcctgaagctgaaatgattgcgggaacagcaactgccggtattcctcatgctgctcttgcggctgaccgtttgaatcttccgatgtgttatgtgaggagcaagccgaaggcgcacggaaaaggcaatcagattgagggagctgtgcaagaggggcaaaaaacagttgtcattgaagacttaatttccacaggaggcagcgtgcttgaagcttgtgcagctttacaagcggccggctgtgaagtgcttggtgtcgtctcaatctttacgtacggacttcccaaagcggaggaagccttcgcaaaggcagaactgctatactactcattaactgattatgatacgctcacagaggtcgcgcttgaaaacggaaatattcattcagatgatctaaaaaagctgcaaacatggaaacgaaatcccgagtcaaaagattggtttaaaaaataaaaaataaattcaaatgatgtaaagaggcttcaaagccttgctgtacttgaaaacaggctgtgaggcctgtttttttattaatcctataaaaaaagtcgggttgacttatgttagaattgtgctaaaatttactacaaatctaaaaacttatcaagagcggctgagggactggacctatgaagcccggcaacctgcatagtttgtaaggtgctacttccagcaaaatgaattccattttgaaagataagggctgcatgctgttcctgtctttctttccgccggattgaaagttttttattttaagaggaaaaaaggctgtctgtgatatcagcagccgcgaatcacattacaattgggaaaagacaaccggcagaaagctactgtttgtttgtctccgaaaggaggaaagaagaaatgttaacgtacgataattgggaagaaccaacgattacatttccggaagacgatccttataaaggagcgctgtcagttttaaaatgggcatacggccattacggcaatcagcttgtttatgcctgcagtttcggaattgagggaatcgttctgattgacttaatttataaagtgaaaaaagacgcagagattgtgtttcttgatacaggacttcattttaaagaaacctatgaaacaattgaacgagtgaaagagcgttatccgggtcttaatatcatcctgaaaaaaccagacctcacccttgaggaacaagccgaagaacatggtgacaaactgtgggaaagagagccgaatcagtgctgctatcttagaaaggtcgttcctttaagagaggcgctttcaggacatccagcctggctttccggcctgcgccgtgatcaagggccaagccgtgccaatacgaatttcttaaacaaagatgaaaaattcaagtcagtaaaagtttgcccgcttatccattggacttggaaagacatttggagatacacatcccggaatgaactggactacaatccgcttcatgaccaaggatatccaagtattggctgtgcgccttgcactgctcccgcttttactgcagaggatttgcgctcaggcagatggaatggtatggcgaaaacagaatgcggactgcatgaataaggagctgcaaaatggaattagccgctattttatttagcttgtttttcgcgatgaatattggtgcaagcggcgctgcagcttcgatgggggttgcttacggctccggagccatcaaaaagaaaacctacgctttgatcctatgcgcagtcggtgtctttgccggggcggtcattggcggaggcgaggttgtaaaaacaatcagctccggcattattcctgagcagacgattacactgacgattgtttgcatcattattggagctgctgccctgtcgctctttactgctaatctgctcggcattcctttgtcgacaagtgaagtaacagtcggcgcggttgtcggcgtgggagtggcttataaagtattgtttgtgaacaatcttctgatcattgtgtcattttgggtttttgtcccgctgttcgctttcggcttcacctatttcgtatctaagctgtttcgttattttaagattgaagtaaaatcttctaaaaaacaaaaaatcctcggcattgttttgttagttgccggatttttcgaagcattctctgccggcatgaataacgtggcgaatgctgttggcccgttagtagctgccgatgtgcttgatgtcggaaaaggaaccttgtatggaggagcttttgttgctcttggcgcactgttattaggccggcgtgtgctagaaacaaacgggaagaaaattacgagattctccaaaggggaaggcattctcttatccggtacaggagcaggacttgtgatcatcagttctgtatttgggatgccggtgcccttggcgcaagtcacgtcatcgtctattatcggaataggcatggcaaaaaacggtccgaacgtgttccataaacaagttgttcaaacgatgctgaaggtatggatcgtatcgccgtttttatctttatcgatttcttatctgcttgtatccttgtttttaaaagcagattattattcgatctttatcatggtaagtgtgcttttagcggcgggcggtgccatcagcctgacaaaggccattcgtaaagagagacgctcagtccacgaacaaggcgggggaatctgatcattaatctgagtaattttataagttaactaggaggagatggatattatgagcttagcaccacacggaggaacattagtaaacagagtagatgaatcatatgatgtgagcggcattcaaaaagaaattgaacttgatttaatttctttcgcggatttggaattgatcggtatcggtgcatacagcccgattgaaggtttctttaatgaaaaagattacgtatctgttgtcgaaaacatgcgtctttcttccggtgttgtttggtctcttccaatcacgcttccggtcgatgcgcaaaaagcagcggaactgtcacttggtgaaacggtaaagttaacgtatgaaggagaaacatacggcgttatccaaatcgaagacctgtatgtgcctgacaaacaaaaagaagctgtcaatgtgtacaaaacagatgaacaggagcatcctggtgttaaaaagctgttcagccgcggcaatacatatgtcggcgggccgattacgttgattaaaaaagcttcaaaacagttccctgaatttacatttgaaccgttagaaacgagacgccagtttgcggaaaaaggctgggaaaccattgtcggtttccaaacaagaaaccctgttcacagagcgcatgaatacattcaaaaaacggctcttgaaacagtagacggcttgttcttgaatccgttagtaggtgaaacaaaatctgatgacattccagctgatgtacggatggaaagctaccaagtgcttcttgatcattattacccgaaagatcgcgttttccttggtgtctttttagcggcgatgcgttatgcaggcccgagggaagcaattttccacgcgcttgtcagaaagaactacggctgcacacatttcatcgtcggccgtgatcatgcaggtgtaggtgactattacggaacatacgaagcacaggagctgtttgacacatttaaacctgaagaactcgggattacgccgctgaaatttgagcacagcttcttctgtaaaaaatgcggaaatatgggaacagcgaaaacatgccctcatggcagagagcatcacgtcattttatcaggcactaaggtaagaggtatgctgagagacggtgtgctgccgcctgctgaattcagtcgaaaagaagtcgtagaagtgttaatcaaagggatgaagaaaaaagaagaagtaggcgtatcttaaggaggactggcagtgacaaatcgcgatattgtatggcatgaagcctctatcacaaaagaagagtaccagcaaaaaaacaagcataaaagctccattctctggctgacagggttaagcggctcaggcaaatcaactattgccaacgccgctgcgagagaattgtttgagcaaggctaccaagtgattgtgctggacggggataatatccgtcacggcttaaataaggatcttggtttttctgatgaagaccgaaaagaaaacatccgccgaatcggagaggtggcaaagctttttgttcagcagggaaccattgtgattactgcttttatctctcctttccgcgaggacagacaacaggttcgcgagcttgtggaagcgggcgaatttaatgaagtctacattaaatgcgaccttgatatttgtgaacaaagagatccgaaagggctttacaaaaaagcaagaaacggcgagattccgttttttacaggaattgattctccttatgaagaaccggaagctccagagctcgttcttgattcaggacaacatgaccgtgaagcgtgtaaaaatcagctgatcgagtttgttaaacaaaaattgagctgaatatgatctgctgcgttcttctcagatgccggaatgcaagcgagaacatcatcacagcgaatgctctggaagaactcgaatagatcgggggaaatacgatggggaaagtatatattgtaggagcgggtcctggtgaccctgatctgttgacaattaaagcgctgaaagccattgaaaaagctgatgtcatcttatatgacagattagtaaataaagagattttacaatatgccaaagagcaagcagacctgatctactgcgggaagcttccagattttcatacgatgaagcaggaaaccatcaatcgatttcttgtgaagtatgcgcaaaaagggaaaatggttgtcagactgaaaggcggagacccttttgtgttcggcagaggaggggaagaagcggaatgcctctctgaaaatggaattccgtttgaaatcatccccggcattacgtctggaatcgcggcagccgcttatgccgggattcctgttactcatcgggaggcgggctctaacgtcgcttttgtaacgggtcattataaaaaagaagaagattttgaggaaaagtggaaagcgctggctacaggaattgatacacttgtcatctatatgggtatcaaaaacgtgcagcagattgaaagaaaactccttgaaaacggccgggacggttctacgccggcagcctttattcattggggaacaacggacaagcaaaagtctgttttttgtacagttgacaccctttcagaaacggtgataaaagaaaacattacaaatccgagtttaattgtcattggaaatgttgtaaattatcactataagctggaatggtttgaatctgaactgaaaaaacaagatttaagcgaggcgttgtaaaaatgaaacaagcaattttatatgtcggccacggcagccgggtcaaaaaagcgcagcaagaagccacagcctttttggaaggatgcaaggcccacatctctgtgccagtacaagaaatcagctttttagagcttcaggagccggcaattgagacaggatttgaagcatgtgtgaagcaaggcgccactcatatcgcagtggtgcctctgcttcttttaacagctgcgcatgcaaaacatgatattccggaagaaattgcccgtgctgcatctcgatatccgtcagtccgcatttcatacggaaagccgatcgggattgacgaagaagtagtcaaggctgtatatcaccgaatgaaagacataggtgttccatatgaaaatgccagagtggtactcatcggaaggggaagttcagatccagatgtcaaaagagacgtaaccggtattgctaatcttcttcaggaaatggttccagtcaaggaagtcattccgtgctttttgacagcatgcggcccgaattacaaagaggttttttcagaacttaaaaaagatgacggcataacaacctttatcgttccatatttgctctttacgggtatgctgatgaatgaaatcgaacgagaggttcagaaattaaaagctcataatccgaacgtctacctctcttcctatatcggttttcatcctcatgtgaaaaacgcatttttgaaccgtgtgagagaaactgcggcaaattctgagggacaatttgattttgatggagattcatatgcttccgctgcacattagcctggaaaagaagaaggttgtgattgcggggggcggcagcatcgctctcagaaggctgaaatcggtgatttctgagggagctgatataacgctcgtcagtccggatgttgaaccggaaatcaagcaaatggcagaagagcgacgtatcaaatgggaaaaacggacaattgaaaaagaagattatctcaatgctttcttcattattgctgcgacggataatgcggcagtgaacaaagaaattgcccaatccgcttcgccttttcagcttgtcaattgtgtcagtgacgctgagcttggcaatgtatatatgccgaaaattgtaaaaagagggcatgtcactgtgtctgtttctacaagcggagccagtccaaagcacacgaaagagcttgctgaaaacgtggataagctgattgacggcgattttattgctgaagtgaacaggctttatcaggtgagaaggaagaaataagccagagcatacaaatgctctggcttttctttatgcggctcagctttttttgagcttgatgacagtatcagcatcaggcgtgacaaagacggtatgctggctgtcataggtgacgaaaccgggtttcgcgccgtttggttttttgacatgcctgatttttgtataatctacaggcactgaacttgaatctttagcttttgaaaaataagctgcaattgtcgcggcttccatgattgtttgctcatccggttcgctgcttctgatcacaacgtgggagcctggaatgtcctttgtgtgaagccagatatcgtctctggccgccgctctggtcgttaaatattcattttgacgattgttcttacccactaaaatcgtcaggcctgaggtggattcatatgtttctaacaccggattgtgcggtttttgctttttctggcctttttgctgcttagggcgtaaatatttgccctcaacaagctcttccctgatttcgctgatatcccggggagaagcggacgaaagctgctgaaacagctgatcaaaatattcgatctcttcctgtgccagcctgatttgctcctcgacaactgcgaccgaatttttcgctttctgatacttcgtgaaataggcctgtgcgttttcagaaggcgttttgtttgggtttaaaggaatcgtgattgtcgggctttcttcattataataattgatgacctcagcctgtttatcaccttttttcaacatatataaattagcggttaaaagctccccgtaaagctgaaattccttcgcgttttccgaatactccagggttttctctaattttttgattttgttggcattcttcttccgttcgttcacaacaaaacgctcaagatcctgagcctgttgcttgacccggtctcgttcagcttttccgaaataaaaacggtcgagcagttcgcttaatgaatcaaaacggcgcgcttcgccctttagatgagtcagctccagcaggtaaaaatattcctttccgtttacagtcgtaatgttgggaatgaaacggtgctctttcacttcagcaaacagtgccagcaacgcttttggcagtgtgactttgttggcaaggcctgctctgtgaaccgcttctttggcgaaaagcggagacacgcctgaaaagtggtcgacaatttgtttatcaagccttccttcttgaaagctgaggtgacgcaaaatatcatcttctgacgcctcaagaggcgatattttgtcctgagcaggcggaagcttataatcttggccgggcagtactgtacggtagctgttcattgacggtgataagtgcttaagtccgtcgatgatcacattttctgctgcgtcagtcaaaatgatattgctgtggcggcccataatttctacataaagctttcgtacggtttcatcgccaatttcgtttcggcttttgatatgaaaaatcataatgcggtctaagcccgcttgttcaattttctcaatgaatccgccttcgatatgctttctcagcaacatgcaaaacattggcggttcgcttggattttcataagcttgtgccgtgatatgcacccgtgaatagctcggatgtgccgataataatagtttttggttttttccattggcacggatgtggaaaatcacatcgtgcttatatggctgatggacttttgtaattcgtccgcccattattttctcgttaagttcgtgtgtcattccgtatgtaaacatgccatcaaacgacatatgcaatacaccctctcattcttcctgcattcgataattatagcatgaaatgggacgagtcagaataagcatgcttatagagtgatatctctataagagagcaggggagtggacgagcggaatgaagtttcatgaaatgggacaaacagatttactagaggcaaccaatacgtccatgaaacaaggattaacagaaaaagaggtaaaaaaacgccttgacaagcatggaccaaacgagctgcaagaaggggaaaaaacttcagcgcttctcttgtttttcgcgcagttcaaagattttatggtgcttgtgcttctggcggcaacgttaatctcaggatttcttggtgaatatgtagatgcggttgcgattattgcgattgtgtttgtgaatggcatacttggtttctttcaagaaaggcgtgctgagcaatctcttcaggctttaaaagagctttcaacaccgcatgtcatggcactcagagaaggaagctggacaaagattccttctaaggaactggtgccgggtgatattgtgaaatttacgagcggggacagaattggcgcagacgttcgaattgttgaagcaagaagccttgaaatagaagaatcagcgctgaccggggaatcaatcccggttgtgaagcatgctgataaattgaaaaaaccggatgtttcacttggcgatattaccaatatggcatttatgggtacgattgtgacccgcggcagcggtgtgggggttgtcgtcgggacaggaatgaatacggctatggggaaaattgccgacatgcttgaatcggcagggacattgtcaaccccgctgcaaagaagactggagcagctcgggaagattttgattgttgttgcattgcttctgaccgtacttgtcgttgctgtcggtgttattcaggggcatgatctgtacagtatgtttttagcaggtgtctcgttagcggtagcagctattccggaggggctgccggcgattgtgacagtggcgctatcgcttggtgtacagcggatgattaaacaaaaatccattgttagaaagcttcctgctgttgaaacgcttgggtgtgcgtctatcatttgttcagataaaacagggacaatgacccaaaacaaaatgacggtgacacatgtctggtccggagggaaaacatggagagtggcaggggccggctatgaaccgaaaggaagcttcacactaaacgaaaaagagatcagtgtcaatgaacataagccgcttcagcagatgcttctgttcggagcgctttgtaacaactccaatatcgagaaaagagacggcgaatatgtgcttgacggagatccgacagagggagcgctgctcaccgcggcaagaaaaggcggtttttcaaaggagtttgttgaatcaaactaccgggtggtcgaagaatttccgtttgattctgcacggaaaatgatgactgtcatcgtagaggatcaagacagaaagcgctatatcattacaaaaggtgcaccggatgtactgatgcagcgatcttcccgtatttattatgacggctcagcggctcttttttcaaatgaaagaaaagcagaaacagaggcggtattaagacatttggcatcacaggcgctcagaacgatagcggtcgcctacaggccgataaaagcaggcgaaacaccgtcaatggagcaggcggaaaaagatctgaccatgcttggcctttcaggtatcattgaccccccgcggccggaagtcagacaggcgataaaagaatgccgtgaagcaggaattaagaccgttatgattacaggtgatcatgtagaaaccgctaaagcgatagcgaaagacttgcgcctccttccgaaaagcggcaaaatcatggacggcaagatgctgaatgaactttctgaagaagagctttctcatgtggtggaggatgtatatgtatttgcccgcgtttcccctgaacataaactaaaaattgtaaaagcctatcaggagaacgggcatattgtggcgatgacgggagacggcgtcaatgatgctcctgccattaaacaagctgatatcggcgtctctatgggcattaccgggacagatgtggccaaagaagcatcatctcttgttctcgtggatgataattttgcgacgattaaatcagcgataaaagaaggcaggaacatctacgaaaatatcaggaagtttatcagatacctgttggcgtctaacgtcggagaaattcttgtcatgctgtttgcgatgctgctggcccttcctttaccgctcgttccgattcagattttgtgggtcaacttggtgacggacggattgccggcgatggcgctcggcatggatcagccggaaggagacgtcatgaagcgcaagccccgtcatccgaaagaaggggtatttgcccgcaagctaggatggaaggtcgtttccagaggatttttaatcggagttgccactattttagcgtttatcattgtgtaccaccgcaatccggaaaacttggcttatgcccagacgatcgcgtttgccacattggtgctcgctcagcttattcacgtgtttgactgccgcagcgaaacttctgttttctctagaaatccgtttcaaaacctgtatttaatcggcgcggtattgtcatccattttgctgatgcttgtagtaatctactatccgccgcttcagccgattttccatactgtagccatcacgccgggggactggatgctcgtcatcggtatgtccgccatccctacttttttgctggcggggtcacttttaacaagaaaaaaataaattcatatgatataatcttaggggtaatagcgtgtctattgcccttttattatgagaacagggaagaattgggtgttttaaaatgatacgaagtatgacaggcttcggcagtgcaagcaaaacacaagacgatctctctgtaagcgttgaacttaaatctgtgaactacagatttaaagaagtgaacgctcgtttgccaaggcctttgctatattttgaagataagctgaaacagaccattctgcagcatattcagcgcggaagaattgagcttttcgtatccgttgacagcgatatgcttgttgagaaaaggcttgaaattgattggccgctgctcgatgagtttgtcgcagccgcgagaggtatgaagaaacggtatcaattgtctgcagagcccgatgtaatggatttctttaagcttgatcatgtcgtccaggttcatgaagaacagacgcaaaatgacaagctggaggcgttgatcatcgatgctgcagaagaagcggtaaaaggtctctgtgaaatgcgtgaaaaagaggggctgctcttagcgaaagactgcctgatgcatattgatcagcttgaagagctggtgagagaaactgaattgctggctgcagatgtcgtatctcgttaccgggaacggctgtacgccagaatcaaagaatggactgaagacgtattagacgagagccggcttgtaacagaatgcgctatttttgcagaccgctctgatatcactgaagagattacaaggctgaagagccacttcgcccagtttcgtgatatattagctagtggcggagctgtcgggcgcaaactcgactttcttgttcaggagctcaatcgggaagcaaatacgattggctcaaaagcaaatgatcatcagatcacaaagcttgtcgttgaaatgaaaagttctattgaaaaaataaaagaacaagtgcaaaatatagaatagtgactgtgcgtattgtttacagacggtcttactaggctaaactagagacgtctattttacagggggaacgtagaagatgacgattaaactgattaatatcggatttggcaatatcatctccgccaatcggatgatttcgattgtcagcccggagtctgcgccaatcaaacggatgattcaggatgcaagagaccgcggaatgctaattgacgctacatacggacgaagaacccgtgcagttgtcgtcatggatagtgatcacattatcttatctgccgtccagcctgagacagttgcacacagactttctgttaaagaagaaattatggatgaagggcaggggtaattgccgcatgaaagaaagagggttattaatcgttctctcaggtccctcaggagttggtaaaggaacggttcgacaagcgatcttttcgcaggaagacacaaaatttgaatattcgatttcagtaaccacaagaagtccaagagagggcgaagtgaacggagtcgattattttttcaaaacaagagacgaattcgagcaaatgattgcggacaacaagctgcttgaatgggcagagtatgtcggcaattattacggcacgccagtcgattatgttgaacagacgcttcaagatggaaaagacgtctttttagaaattgaagttcaaggggctcttcaagtgagaaatgctttcccggaaggcctatttattttccttgcgcctccaagcctttctgaactgaaaaacagaatcgtgacacgaggcacagaaacagacgctctgattgaaaatcgaatgaaagccgcaaaagctgagatcgaaatgatggatgcttatgactatgtcgttgaaaacgataatgtcgaaacggcttgcgataaaatcaaagcaatcgttcttgctgaacatttgaagcgtgaacgcgttgcaccaagatataagaaaatgctggaggttgaataatcaatgttagatccgtcaattgattctttaatgaataaattagattcaaaatatacgctggtgactgtttctgcgagacgcgcacgtgaaatgcaaatcaaaaaagaccaaatgattgaacatacgatttcacacaaatatgtaggcaaagctttagaagaaattgatgcaggcctgctttcgtttgaaaaggaagaccgcgaatagtagcacaagtagcaacctatatcagatgtaggttgttatttttttccgtgcggttttgtaaagtgcagagggggagaattcattgctaaacaatcgaaatgtgttactttgcgtgagcggaggcatcgctgtttataaagcctgtgcgttaacgagcaagctggttcaggcaggagcaaatgtcaaagtgattatgactgaatccgcttgccgattcgtttcaccgctgacatttcaggcattgagccgccacgaagtctatacagatacatttaaagaacaaaatccaagcgttatttctcatattgatgccgcagactgggccgacttgattattgtagcgccggctacggctaatgtgattggaaaactggcaaacggcatcgctgatgatatgctgacgacaacattgttggcagcaacggctcccgtttggatcgcgccggcgatgaacgttcatatgtatgaccacccggcagtcaaacgaaacatttctgttctttatcaggacggttatcgttttattgagccaagtgagggctatttagcatgcggttacgtaggaaaaggcagattggaagagccggaaaacatcgtaaagctggccgaaaaacattttgctgaagaaacatccgctcctttagaaggcaagcatgtggtcattacagccggtccaacgcgggaagcgattgatcctgtccggttttttaccaataaatcgacgggcaaaatgggctacgcactagcggaggctgctgttcagctcggcgcacgggtaaccttaatttctgggcctgtttcacttgatcagcctaaaggccttgctgagtttatccctgttcaatcggctgcggatatgcgcgaagctgtgctctctgtgtatgacgcaagcgatatagtcattaaaacagctgcggtagccgattttacgccgaaaacagtatttgaccataaaatgaaaaaacaagacggcggcatgaccttagaactgaaaagaacagtcgatattttgaaagaattgggcgagaaaaagaaagagcagattttggtcggatttgccgccgaaacacaagacattgaacactatgcacgtaaaaagctcgccgctaaaaaccttgatttgattgtggcaaatgatgtgaaagcaaatggggccggttttggtgctgatacgaatatcgtgacaatctttttcaaagacgggcataaacgcgaactcccgatcatgtctaagctcgatgtttcttttgaggtccttcaggagatcgcagccctctcaaaacaaaccggagagcgctcatgaattttgcagaagtcatcgttgatgtcagcaccaaaaatatagacaggccttttgattataaaatcccagaccatctcaagggcatgatcaaaacggggatgcgggtcattgttccgtttggcccccgtaagattcaagggtttgtgacagcagtcaaagaagcatctgacctatcgggaaaatctgtcaaggaagtagaggatttattagatcttacacctgttctgacagaggagcttatgattctgtcatcatggctgtcagacaaaacgctgtcttttaaaataacggcgcttcaagcaatgctgcctgccgccttaaaggcgaaatatgaaaaagaattaaaaattgcacacggagccgatcttccgccgcaagtggaacggctgttttctgaaacaaagacgctgctgtattcagatatacccgatcatgagacgctgaaactgattcaaaggcatgttcaaaaaggggacattgacgtgacgtataaagtcgcgcaaaaaaccaataaaaaaatggtcaggcatattcaggcaaatgcgagtaaagaagagcttgctaagcaggctgagggattgtcccgccaagcagcaaaacagcaggcgattcttcactttctcatctctgagccggaaggtgtgaaaattcctgcggcggaattgtgcaaaaaaacggatacgagctctgcaaccattaaaacccttatccaaaaagggcttttgaaggaaagctatgaagaggtttacagagatccctatcaggacaaaatgttcaaaaaaacagagcccctgccgctgacagacgaacagagggctgccttcgagcccatacgcgagacattggacagcgatgagcataaagtgttcctccttcacggcgtgacaggaagcggaaaaaccgaaatttatctgcaatcaattgaaaaagtactggcgaaaggaaaagaagccatcgtcctcgtaccggaaatatcgctgacgccgcaaatggtcaaccgcttcaagggccgcttcggctcccaggtggcagtcatgcacagcggtttatccacaggagaaaaatatgacgagtggcgtaaaatccaccggaaggaagtacggcttgtcgtcggtgccagatccgccatttttgctccgtttgaaaatctcggaatgataatcatcgatgaagagcacgagtcttcctataaacaggaagaaatgccgcgctatcatgcgaaagaggtggcaatcaagcgggctgagcatcacagctgcccggttgtattagggagtgctacgccgacattagaatcatatgctagagcgcaaaagggcgtatacgagcttctttcactgaagcaccgtgttaaccatcgggtgatgcccgaggtttcgcttgtcgatatgagagaggagcttagaaacggcaatcgctcgatgttttcagttgaattgatggaaaagcttgaagaaacgattgccaagggtgagcaggcggtgctgtttttaaataagaggggctactcttcctttgtgatgtgcagggattgcggctatgtcccgcaatgcccgcactgcgacatttccatgacgtatcatcgttacggccaaaggctgaaatgccattattgcggacatgaagagcctgttccgcacacttgtcctgaatgcgcaagcgagcatatccgctttttcggaacgggaacacagcgagtggaggaagagctgacaaaagtgctgccaagtgcgagagtgattcggatggatgttgacacgacatcacggaaaggcgcccatgaaaaattactgtcagctttcggagaaggaaaagcggatattcttctcggaacgcaaatgatcgcgaaagggcttgattttccgaatgtcacgcttgtcggagtgttaagtgctgatacaacacttcatattcctgatttcagatcggctgaaaaaacatttcagctgttaacgcaagtcagcggccgggcaggcaggcatgaaaagcccggccatgtcatcattcaaacgtatacaccgtctcattacagtatccagctgacgaaaacacacgattatgaaacgttctatcagcatgaaatggcgcacaggagagagcaatcctatccgccatactactatttggctcttgtgactgtttctcatgaggaagtggcgaaagcagcggttacagctgaaaaaatcgctcattttttgaaagcaaactgcggagctgacacgaaaattctcggaccaagcgcgtcgccgatagccaggatcaaagatagatatcgctatcaatgcgtgataaaatacaaacaggaaacccagttatccgctttattgaagaagatactggaacattataaacgcgaaattgaacaaaaacatgtaatgatttcaattgatatgaatccttatatgatgatgtaagatctcacgtcttggagggtaacaaattggcagtaaaaaaggtcgtcacacatcctgcggaggttttggaaacacctgcggaaaccgtgactgtttttgataaaaagctaaaaaaactgcttgatgatatgtacgacaccatgcttgaaatggatggtgtcggactggcagcgccgcaaatcggcattttaaaaagagcggccgtcgtagatatcggggatgacagagggagaattgatctcgttaatcctgaaattttagaaaaaagcggcgagcaaaccggaattgaaggatgcttgagctttcctaacgtctatggtgatgtcacacgtgccgattatgtcaaagtgcgtgcgtttaaccgtcagggaaaaccgttcattctggaagcgcgaggctttttagcaagagccgtgcagcatgaaatggaccacttagacggtgtgctgtttacatctaaaataagtaaatactatacagaagatgaactagcggatatggaaggatgatttgatgacgagaatcgtatttatgggaacgccggatttttcagttcctgttttaagaaccctgatagaggacggatatgaagtagtgggggtcgtcacacagccggaccgtccgaagggcagaaaaaaagtactgacacctcctccggtaaaggaagaggcattgcgccacggcatcccggttcttcagccggaaaaagtcagattgacagaagaaattgaaaaagtgctggcattaaagcctgacctgattgtaacggcggcattcggacaaattttgcctaaagagcttctcgacagtccaaaatacggctgcattaacgttcacgcatcccttttgccggaactgcgcggcggtgctccgatccattattccattctgcagggaaagaagaaaaccgggattaccattatgtatatggtagaaaaattggatgcgggcgatatgatctcaaaagtggaagtggacattgaagaaaccgacaatgtcggaacactgcacgataaattaagcgttgctggcgcgaagctattgtctgaaacggttccaaacgttattgccggcagcatatcacctgaaaagcaggatgaagagaaagcgacgtacgcgcctaacattaaaagagagcaagagctgctcgactggtccagaacgggcgaagagctttacaaccagatccgcggcttaaatccatggcctgttgcttatacgactctaaacggacaaaacttgaaaatatgggcgtcgaaaaaaatagcggcaccaacaacagctgagcccggcacagtcgttgcagttgaaaaggaaggaattatcgttgcctcaggtaacgagacggctctgttattaaccgaactccagccggcaggcaaaaaacgaatgaaaggcgaagactttgtgcgaggcgctcatgttgaagccggtgatgtgttaggagtaaacaatgaaaaaaactagtgttcgtgacatcgcccttgaggcgctgatcaaattagaacaaaaccaggcatacagcaacctgctgctgaaatcggtcattaaatcaaatgaactgagtgatcaggacagagggcttttgactgaacttgtctatggtacattacaaaataagatcgcgcttgattatatgcttaaaccgtttatcaataagcctcaaaaggtaaagccgtgggtgattcagcttcttcgcctatccttatatcaaatggagtatttggagaagattccagacagggcagccattcatgaagcggttgagattgctaaaatccgtggacacaaaggcattgcttcatttgtcaacggcgtgctccgttctattcagcgcgaaggtgttccatcctttgacgcgatcgaagatcctgtccgccggctggcgacagaaacaagccatccggaatggcttgtgaaagagtgggcggatgcgtatggatttgaagctgcggaaaagatttgccgcatccatctcattccgccgaaacagacgctgcgtgtcaatcaaatgaaagcagacagagctgagctgcttgaccaaatggctgctgagggaatcgaagttgaaaaaagcgacctcgctgaagatgctgtgaagctcttaaagggaacaattgccggaactcatttcttccaaaacggcgaagtttctatccaggatgagagctccatgctcgtcgcccgcgcccttgatcctaagtcagatgaaacagtgcttgacgcgtgtgcggcgcctggcggaaaatcggctcatatcgcagaattaatgaagaacaaggggagcgttacgtcgcttgatcttcacaaacataaagtgaagctgatcaaagaagcggcagatcggcttggcctgacaatcattcatgcggaaacaatggatgctagaaaagcgggggaaacgtttgaaaacgaacagtttgaccgaatattggtcgatgccccgtgctcaggtttcggtgttatcagaagaaagccggacatgaaatacacgaaaaaacctgacgacagcgcccgtctagctgaaatccagctgtcgatcttgagggaaatcgcaccattagtaaaaaaaggtggcactcttgtctacagtacgtgtacaatggaccggacagaaaatgatgaagtaatacatgcgtttatacaagaacatcctgattttgaacccgatttgtctcttgaaaagcggctgcctgaaaaggtgagaccctttgttcgggatggaaggcttcaaatccttcctcattatttcggaacagatggtttctttatttgcagcatgagaaagaagggataagcaatggcagaacttaataaaacaaaagtaagaaaagaattgcggacagagcgtccgtctatttattcttttgaattagatgaaatcaaacaatggctgacagacaatggagagaaaccgttccgtgcagcccagatctttgaatggctatatgaaaaacgcgtatcttcttttgaagatatgacaaacctctcaaaggatctgcgtgagaaattaaacactcactttgtgttaacaacgctgaaaacggctgttaaacaaacctctcaagacggtacgatgaagtttttgtttgagcttcatgacggttataccatcgaaaccgttttaatgagacacgagtatggcaattctgtatgtgtaacgacacaagtcggctgccgtattggctgcacattctgcgcgtcaacgcttggaggcttaaaacgaaaccttgaagcaggggaaattgtcgctcaagtagtcaaagtgcaaaaagctcttgatgaaacggatgaacgcgtcagctctgtcgtgatcatgggaatcggcgaaccttttgataactttaacgaaatgctcgctttcttgaaaatcattaaccatgacaagggcctgaatatcggtgctcgccatattacggtctctacgagtgggatcatcccgaaaatttacgaatttgctgatcagcaaatgcagattaactttgcaatttctctgcacgcgccgaacacagaaatcagaagccgtttgatgccgattaacagagcatataaactgcctgatctaatggaagccgttaaatattatattaataaaacgggacgccgcatcagctttgaatacgggctgttcggaggcgtaaacgaccaggtggaacacgccgaagagcttgccgacttgctggaaggagtcaaatgccacgtgaacttgattccggtaaactacgtgcctgaacgggactatgtgcgcacaccgcgtgatcagatttttgcttttgaaaaaacgctgaaatcccgcggagtaaatgtcacaatccgaagagagcaaggacatgacattgacgcagcctgcggtcagcttcgcgcgaaggagcgtcaagacgagacgaggtgatgagggttgttaacagccttaaaaacagatacaggaaaaatccgccagcataatgaagatgatgcggggatattcaaggggaaagatgaatttatattagcggttgtcgctgatggcatgggcggccatcttgctggagatgttgcgagcaagatggctgtgaaagccatgggggagaaatggaatgaagcagagactattccaactgcgccctcggaatgtgaaaaatggctcattgaacagattctttcggtaaacagcaaaatatacgatcacgctcaagcccacgaagaatgccaaggcatggggacgacgattgtatgtgcgctttttacggggaaaacggtttctgttgcccatatcggagacagcagatgctatttgcttcaggacgatgatttcgttcaagtgacagaagaccattcgcttgtaaatgaactggttcgcactggagagatttccagagaagacgctgaacatcatccgcgaaaaaatgtgttgacgaaggcgcttggaacagaccagtcagtcagcattgacacccgttcctttgatatagaacccggagacaaactgcttctatgttctgacggactgacgaataaagtggaaggcactgagttaaaagacatcctgcaaagcgattcagctcctcaggaaaaagtaaacctgcttgtggacaaagccaatcagaatggcggagaagacaacataacagcagttttgcttgagcttgctttacaagttgaagagggtgaagatcagtgctaatcggcaagcggatcagcgggcgttaccaaattctccgcgttataggcggcgggggaatggccaacgtgtatttagctgaggatatcattctagaccgtgaagtcgcaattaaaatcctgcggtttgactatgcaaatgacaatgaatttatcaggcgtttccgcagagaagcccaatccgcatcaagcctcgatcacccgaatattgtcagcatttatgatttgggcgaggaagatgatatttattatattgtcatggaatacgttgaaggcatgacgcttaaagaatacataacagcaaatgggccgcttcaccctaaagaagcgctgaacatcatggagcaaattgtctcagccatcgctcatgcccatcaaaaccagattgttcacagagacatcaagccgcataacattttgattgatcatatgggaaatatcaaagtaacggattttggaattgcgacggcactaagttcgaccacaatcacccataccaattcagttctgggctcggtccattacttatcacctgaacaggcccggggcggcttagccacaaaaaaatcggatatttatgcgcttggaatcgttctatttgagcttttaaccggccgtattccgtttgatggagagtcagcagtcagcatcgccttgaagcatcttcaagcggaaactccttcggcaaaaaggtggaatccatcggtcccccaaagcgttgaaaacatcatactcaaggcaactgccaaagatccttttcatcgctacgaaacggctgaagacatggaagcagacataaaaacagcttttgatgccgacagactcaatgaaaagagatttacgattcaagaagatgaagaaatgacaaaagcgatacctatcattaaagatgaagaacttgctaaagctgctggcgaaaaagaagctgaagtgacaaccgcacaagaaaacaaaacaaagaagaacggcaaaagaaaaaagtggccgtgggttttgctcacgatatgcctcgtttttatcacagctggaattcttgctgtcactgtttttccgtcgcttttcatgcctaaggatgtcaaaatacctgatgtctccggaatggaatacgaaaaagccgcagggctcttggaaaaagaaggtttacaggttgattccgaggtgttggaaatctcagatgaaaaaattgaagagggcctgatggtaaaaacggatcctaaagcggataccacagtcaaagaaggcgccacggtcaccctttataagagcaccggaaaagcaaaaacggagatcggtgatgtgacaggccaaacggtcgaccaggcaaaaaaagcgttgaaggaccaagggtttaaacatgtaacggtaaatgaagtgaatgacgagaaaaacgcgggcactgtcattgaccaaaatccttcagcagggactgagcttgtcccgagtgaagatcaagtcaaacttacagtcagtatcggacccgaagacattacgcttagagacttgaaaacctacagtaaagaagcagcgtctggatatctggaagacaacggattgaagcttgtagaaaaagaagcatactcagatgatgttccagaaggacaggttgtcaaacaaaaaccagcagcaggtacggcagtaaagccgggaaacgaagttgaagtgacattctctctcggaccagagaaaaaacctgcgaaaacagtgaaagaaaaggtcaagatcccctacgaaccagaaaatgaaggggacgagcttcaagtgcaaatcgcggttgacgatgcggatcacagcatctctgacacttacgaagaatttaagataaaagagccgactgaacgaacgatcgaactaaagattgaacccggccaaaaagggtactatcaagtaatggtaaacaataaagttgtcagctacaaaaccattgagtatccaaaagatgaataacaaggagggaaaatatgcctgagggcaaaattattaaggcgctaagcggcttttactatgtactggatgaatcagaggattcagataaagtaatacaatgcagaggaagaggcattttcagaaaaaacaaaattacccctcttgtcggtgattacgttgtgtatcaagctgaaaatgacaaagaaggatatctaatggaaattaaagaaagaaccaacgagcttatcaggccgccaatttgcaacgttgatcaagcggtcctggttttctcagcggttcagccttctttcagcacggcattgctcgaccgcttcctggttctcgttgaggccaatgatattcagccgattatatgcattactaaaatggatctgattgaagatcaagatacagaagatacgatacaagcctatgcagaagactatcggaatattggttatgacgtataccttacctcctctaaggaccaagacagtttaacggacatcatcccgcattttcaggataaaacaacggtatttgccggtcagtccggtgttgggaaatcctcgcttctcaacgcgatcagtccggagcttggattaagaacaaacgagatttctgagcatttgggccgcgggaaacacacaacccgccacgtggagctgattcatacgtccggaggtttggttgcagatacaccaggattcagctcgcttgaatttacagacattgaggaagaagagctgggctataccttccctgatatcagagaaaaaagctcttcatgcaaatttagaggctgtttacatctgaaagagccgaaatgcgcggtgaaacaagctgttgaagacggagaattaaagcagtatcgctatgaccattatgttgaatttatgacggagattaaagacagaaagccgaggtattagcataatgataaaggttgcaccatctattctttccgctgattttgccgctttaggcaatgagattaaagatgtagaaaaaggcggagccgattgtattcatattgatgttatggacggccgttttgtcccgaatatcacaatcggtccgctgattgtagaagcggtccggccggtaacggatctgccgcttgatgtccatttaatgatagaagagccggatcgttatatcccggcttttgcgaaagcaggcgcagatatcctgtctgtgcatgctgaggcatgtccgcacctgcaccgtaccatccagctcattaaagagcaaggagtgaaggccggagtagttctaaacccgcatacccctgtacaagtcatcgaacatgttttcgacgatcttgatcttgttcttttaatgacggtgaacccgggcttcggcgggcagaaatttattcattcagtccttcctaaaataaaagaggttaagcgaatggcggatgaaaaaggaaaaaaagatctgttcattgaagtagacggcggcgtcaacaaagaaaccgctccgctcgtcattgaagcgggcgcaaatttactcgttgccggttcagctgtttatggccagtctgaccgcaaaaaagcaatttctgaaatcagaggaagtaaataagcagctttagaaaagagctgggcatacaatagcctaagctctttttcctgtatgcagagaaaggaatcagagatgaaaacaattaatatcgttgcgggaggcccgaaaaatctcattcccgatctaaccggctatacggatgaacacacgctttggatcggtgttgacaaaggcaccgtcactctcttagatgccgggatcattcctgttgaagccttcggagattttgacagcataacggagcaagaacgccggcgaatagaaaaagccgctcccgcccttcatgtgtatcaagcagaaaaagatcaaacagatttagacctcgcccttgattgggcgctggaaaagcagccggatattattcagattttcggcattacaggcggcagagctgatcattttttaggaaacattcagctactgtatagaggtgtaaaaacgaacataaaaattaggctgatagacaaacaaaatcatattcaaatgttccctcctggtgaatatgatattgagaaggatgaaaataagcgatatatctccttcataccgttttccgaagacatacatgagctgaccctgaccggttttaaatatcctctaaataattgtcatattacgctcggttcaacactatgtattagtaacgaactcattcattcacgaggtactttttcgtttgcaaaaggcatattaataatgataagaagcacggattaagcatgtgctttcattcaattgctaaaaacaatgaacaaggcggttacgggacgttataggaggggacaaaaatgaaattttacaccattaaattgccgaagtttttaggaggaattgtccgggcgatgctgggctcatttagaaaagattaatgcccaggggttcaaagccctctttcaccacataaaaacgcctgccacatatcggggcaggcgttcattttgttatacacgctcaactttaccggatttcaaagctcgagcagatacatatacttttttaggttttccgttcacaaggatacgaaccttttgaagattcgcgccccaagtgcgcttagaagcgttcattgcgtgagaacggttattcccagctgttgtttttttacctgtgataacgcatttacgtgccatttgtttccctcctcacttgcacaaaacatctactttttaacattcatataatcttagatgctttcgatatggatactttaaataatttaccacagctaaaaaacgtttgcaactattgtttcatcatctttcaagaaaattcacttgacatcttgcggaaacagcagcgctatagtatatgtagaggtacggccagcgattattgcctggtcttttcataatggaaaccatatagtagaatagctgtaactctatgcattcgaaggaggaactagtgtgtccattgaattaagaacgaagtacggacagattgatatatctaatgaagtcatcgcgatggttgcaggaggcgcggcggttgactgttacggcattgtcggtatggcctctaaaaaccagattaaagacggactgactgaaatccttcggaaagagaatttcagcaggggtgtccaagttcgccaagaaggagaacagatacatatcgacatgtatatcattgtcagctacggcacgaaaatttctgaagtggcacataatgtccaaacaaaagtaaagtacacagtaaatcaaaccatcggactggcagtggattctgtcaatatttatgtccaaggcgtacgagtgacgaacccgtagttaggaggagtaggattgtctatcagaacattagacggcagaacctttgccgagatgattcttgcgggagcgcagaatctgtctcaaaacgccagtgcagttgatgcactgaacgtgtttccggtgccggacggtgatacgggaacaaatatgaacctgtcgatgacttccggagcaagagaagttgaacaaatggatacggatgatatcgggaaggtgggctccgcgttatctaaagggctgctcatgggagcacgcggaaattcaggagttatcctatcccaattgttccgcggatttagcaaaagcattgaaacgaaaaaagaaattaatgcacttgagtttgccgctgcgctgcaagcaggtgtagacatggcgtataaagctgtcatgaaacctgtagagggcaccattttaacagttgcaaaagacgctgcaaaaaaagcgatgatcttagcagaaaaagaaaccgatatcactgcgctgatgattgcagtgacagaagaagcagaggcgtctttaaaccgcacccctgaattgctacctgtcctaaaggaagtaggagttgtcgatagcgggggcaaaggcctgctctgtgtgtatgaaggtttccttgcttcattaaaaggtgaaactgtacctcagaaagcagttcttccgtcacttgacgacatggtcagcgcagagcatcacaagagcgcgcaaagcatgatgaataccgaagatattgaatttggattctgtaccgaagtgatggttaggcttgatcagacaaaaagagagttcgacgaaggcacgttcaggcaagacctcagccagttcggagattctctgcttgtgattgcggatgaatcgctggcgaaggttcatattcatgctgaagagccgggaaacgtgttaaactacgcccagcattacggtgaattgatcaaaataaaaatagaaaatatgagagaacagcatacctctatcatcagtcaagaaagcaaacctgcagacaacgaaataccgccggcaaagcagccgtatggcattgtgactgtggcgatgggagaaggaatttcagacctattcaaaagcattggcgcttctgttgtgattgaaggcggccagaccatgaacccaagcactgaggatattgttgatgccgtgaagtctgtaaatgcagatacggtatttatcctgcctaacaactccaacattatcatggctgctaaccaagcggccagcgtagtggatgaacaggtttttgtcattcctgctaaaacggttccgcaagggatgtcagccctgctggcttttaacccggatcaagaagctgaagcgaacgaggccaatatgctaagcgccattcagcaagtaaaaagcggacaggtgacgttctcagtcagagatactcatattgacggtaaagatattaaaaaaggcgactttatgggcattctgaatggaacgattatcggcacttctgaaaatcagctgtcagccgcgaaaatgctgctgtcagaaatgatcggagaagatgatgaaatcgtgaccattctatatggtgaggatgcgtctcaggaagaagctgagcagcttgaagcgtttctcagtgaaaagtacgaggagattgaggttgagatccacaatgggaaacagcctctgtattcgtatatagtttctgcagaatagaagggcaatttgcccttctattcttatgtctgcttttaagtgcggcagcgctgtaacgcgcccgcttgccattttatatctgatcaattagtctagaagcaaagcgctaataagctctggttcataaggaggaatagcatgaaatacagaagcgtttttgatattatcggcccggttatgatcggtccgtccagctctcatacagcgggagctgctagaatcgggagagtggccagaagtttatttggcagagagcctgagcgcatcattgtatctttttacggctcgtttgcggaaacgtataagggccacggcacagatgtcgcgattatcggcggattgcttgattttgatacattcgatgaacggattaaaaccgctatacaaattgcagaagctaaaggaattgatatagagtttcgggtagaagacgcagtcccggtccatccgaacacagcaaaaatcaccatttctgatgaaaagggtgagcttgaactgacgggtatttcgattggcggaggaaagattgaaatcacagaattgaatggttttgagctccggctgtcaggaaatcatccggccatattagttgttcataatgacaagtttggcacaattgccggtgttgccaatgttctggcgaaattttcaatcaacgtaggacatatggaagtagcccggaaagatatcggccagcttgcgctgatgacaatagaggtcgaccaaaatattgacgaccacattctcgacgagctgtcgaaactgccgaatattattcaagtgacaaagattgctgactagcgaaaagggtcaggaggagccagttatgtttcgtaatgtaaaagaattaattgagattactaaagaaaaacaaatattgatctctgatgtgatgatagctcaagagatggaagtaacagaaaaaacaaaagaggacatttttcagcagatggatcataacctgtctgttatggaagcggcggttcagaaaggactcgagggagttacgagccaaacgggcttaacaggcggagatgccgttaaattgcaggcctatattcgatcaggaaaaagcctgtctggcccgctgattttagatgctgtatcgaaagccgttgcaacaaatgaagtaaatgcagccatgggaaccatctgtgcgacaccgactgcaggttctgccggtgtggtgcccggtacgttatttgctgtaaaagaaaagctgaatccaacaagagaacaaatgatccgctttttgtttacagccggggctttcggatttgtcgtggccaataacgcaagcatttccggcgccgccggaggatgtcaggcagaggttggatcagcttcaggcatggcggctgcggctattgttgaaatggcaggaggaacacccgaacaaagcgcggaagccatggccattacattaaaaaatatgctaggcctcgtgtgcgaccctgttgcagggcttgttgaggtgccttgcgtgaaacggaatgcgatgggcgcgtcaaatgcaatgattgccgctgatatggcattggcgggcattacaagccgtattccatgtgatgaggttatcgatgccatgtataaaataggccaaacgatgccaactgcacttagagaaacaggccagggcggtttagcggcaacaccgacaggaagagaattagagaaaaaaattttcggaggagcgctaggttcacgtgaaacaacatcagcaaactagtatagctaacattaagggtattgggccggaaacagaaaaaacattacacgaactcggtatttatgacatttctgatcttctgaattatttcccttatcgctatgatgactacgagctgagggatttagaagaagtaaagcatgatgaaagagtcacagtcgaagggaaggttcattcagagccttctcttacctattacggaaaaaaacgaaacaggctgacattcaggcttctggtcggccactatttaatcacagccgtatgttttaaccggccttatttgaagaagaagctttcgctcggctctgtggtgacggtttcaggtaaatgggacaagcaccgccaaaacatctctgttcaggagttgaaaaacgggccgcatcaagaagacaaaagcattgaaccagtgtattctgtgaaagaaaatgttaccgtcaaaatgatgaggcgctttattcagcaggcgctgacccaatatgcagactcacttcctgatcctcttccggaaaagctaagaaaaagctataaactgcctgactattatcaagcgttaaaagcaatgcaccagcctgaaacaagggaagcattaaagcttgccagacggcggtttgtttatgaagaatttttgttgtttcagttgaaaatgcaggcgttccgaaaggcggaaagagagcagacacaagggatacggcagcgtttttcaaacgaagaactcatgagatttatcaaaagcctcccgtttcccctcacaaacgcccagtcacgcgttcttcgcgaaataacagcagacatgtcttctccatacagaatgaaccgccttcttcaaggggacgttggatcaggaaaaacggcagtcgccgccattgcactgtatgccgcgatcctatccggataccaaggagcgctcatggtgccgacagaaattctggccgagcagcatgctgattcgctcgtttcgctatttgaaaaatgggacgtcagcgttgctcttttgacaagctctgttaaagggaagcggcgaaaagaactgcttgagcgtcttgcggcgggtgagattgatattcttgtaggaacccacgctttaatccaagacgaggtggagtttaaggcgctgagtctcgttattacagatgaacagcacagatttggagttgagcagcgcaaaaagcttcggaacaaagggcaggatcccgatgttctctttatgacagccactccaatcccaagaacattagcgatcacagtgttcggtgaaatggatgtatctgtcattgatgagatgccggctggacgaaagagaatcgagacctattgggtaaaacatgacatgctggatcgtatattggcatttgtcgaaaaagaattaaagcaaggcaggcaggcttatatcatctgtccgctgattgaagaatcagacaagcttgatgtgcaaaacgctattgacgtgtacaatatgctttctgatatttttcggggaaaatggaatgtcggccttatgcatggaaagctgcattccgatgaaaaagaccaggtcatgagagaattcagcgcaaatcactgtcaaattctcgtatcaaccactgttgtggaggttggcgtgaatgttccgaatgcaacgattatggtgatttatgacgccgaccgttttgggctatcacagcttcaccagctgcgcggccgtgttggacggggtgagcatcaatctttctgtattctgatggctgatccaaaatcagaaacagggaaagaacggatgaggatcatgtcggaaaccaatgacggtttcgagctgtctgaaaaggatctggaactgagaggtcccggtgatttcttcgggaaaaaacaaagcggaatgccggaatttaaagtggcggacatggttcatgattacagagcgcttgaaacggcaaggcaggatgctgcgaatcttgtggcttctgacgcgttctggaaggagccggaatacgctgtgttaagagatgaattgctgaagagcggagtaatggacggggaaaaattaagctgagtatcagaagtttttggtgttcagccagaaacaatcgttgcattccaatctatgaaattatatactactattagtacctagtcttaattgtccggatggtgtttagatatgagaagaaataagagagaacgccaggaattacttcagcagacgattcaagcaaccccctttattacagatgaagaactagcgggtaaattcggggtgagcatccagacgatacgtttggaccgcttagagctttccatacctgaactgagagaaagaattaagaacgtggcagagaaaacacttgaggacgaagtgaagtccctgtcacttgatgaagttatcggagaaattattgaccttgagctggatgatcaggcgatatccattttagaaataaaacaggagcacgtgttcagccggaatcagattgcgagaggacaccatttatttgcacaggcgaattctttggccgttgcagtcattgatgacgagctggcgctgactgcaagtgcagacatccgctttacaagacaggtaaagcagggtgaacgtgtcgtagcaaaagcgaaagtgacggctgtcgaaaaaggaagaacggttgtcgaagtgaacagctacgttggcgaagaaattgttttttctggacgctttgacatgtatcgttcaaaacattcataaaggtggagcatgcatgagaatagctgtagatgcaatgggaggagaccacgctcccaaagctgttattgacggagttataaaaggtatagaggcatttgatgatctccatatcacacttgtcggtgacaaaacaacgatagaatcacatttaacaactacatcagatcgcatcacggtgctgcacgcagatgaagtgattgagcctacggatgaaccggtccgtgccgtgcgaagaaaaaagaactcatctatggttcttatggcgcaggaggttgcggaaaacagagctgacgcctgcatttcagcaggaaataccggtgcattaatgacagccggtctctttattgtcggaagaattaaaggaattgaccgtccggcgcttgccccgacacttccgactgtttcgggagacggatttcttctccttgatgtcggcgccaatgtcgatgccaaaccggagcacctcgttcaatatgccatcatgggttctgtttattctcagcaagtgcgcggtgtcacttcaccgagagtcggacttttaaatgtcggaacagaagataaaaaaggaaacgaactgacgaagcagacgttccaaattttaaaagaaacagcaaacatcaattttatcggaaacgtggaagcgcgagaccttttagatgatgtggcggatgttgtagtaacagacggctttaccgggaatgttacactcaaaacgctggaaggctctgcgttgtcaatttttaaaatgatgagagacgtaatgacgtctactttgacatccaagcttgcagcagctgtgctgaaaccaaaattgaaagaaatgaaaatgaaaatggagtattcgaattatggcggagcaagtctttttggcttaaaagcgcctgtgatcaaggcgcacggctcttcagattcaaatgctgtattccatgcgattcggcaagcaagagagatggtcagccaaaatgtggctgcgctcattcaggaagaagtgaaagaagaaaaaacagatgagtagtctggaggtttttacatcatgagtaagattgcatttttattcccgggtcagggatcacaatttatcggcatgggaaaagagctttatgagcaggtgcctgctgcaaagcgtctgtttgatgaagccgatgaaacgttggaaacaaaactcagctcgcttatttttgagggggatgctgaagaattaacacttacatacaatgcgcagcctgctttgcttacgacaagcatcgctgttcttgagaaatttaaagaatctggcattacacctgatttcacagcaggacacagccttggtgaatattctgcactggttgcggctggcgctctgtctttcaaagatgctgtttatactgtcagaaagcgcggagagtttatgaatgaagcggtgccggctggcgaaggagcaatggctgcgattctcggcatggatgctgaagcattaaagcaagtaaccgataaagtcacagaggaaggcaaccttgtacagcttgcgaatctcaactgtcctggccaaatcgtcatttccggaacagctaaaggggttgagcttgcatctgaactggcaaaagagaacggcgcaaaacgcgcaattccgcttgaagtaagcggtccgttccattctgaactgatgaaaccggctgctgaaaagctgaaagaggtattggacgcctgtgacataaaagacgctgccgttccggtcatctcaaatgtttctgctgacgtgatgactgaaaaagcagatatcaaagaaaaacttattgagcagctttactctccggttcgttttgaggaaagcattaacaagctgatcgcagagggtgttacgacttttattgaaatcggtcccggaaaagtgctttcaggccttgtgaaaaaagtgaatagacggttaaaaacaattgctgtatcagatccggaaacgatcgagctggcaattcaaacgcttaaggaggagaatgataatgcttaatgataaaacggctattgtcactggcgcatcccgcggaatcggccgctcaatcgcccttgatctggcaaaaagcggagcaaatgttgtcgtgaactactccggcaatgaagcgaaagcaaatgaagtggttgatgaaatcaaatcaatgggcagaaaagcaattgctgtcaaagcggatgtatcaaatcccgaagatgtacaaaacatgataaaagaaacattgtctgttttttctacgattgacattctggttaataatgcgggaattacaagagacaatctcatcatgagaatgaaagaagatgaatgggatgatgtcattaacattaacctgaagggtgttttcaactgcacgaaagctgttacaagacaaatgatgaaacagcgttcaggccgcattattaacgtatcgtctatcgtcggcgtcagcggaaaccctggacaagccaactacgtggctgcaaaagctggcgtcatcggtttaaccaagtcttctgctaaagagctcgccagccgaaatattacggtaaacgcaatagcgccaggatttatctcaactgatatgacagataaacttgcaaaagacgttcaagacgaaatgctgaaacaaattccgctcgcgcgctttggtgaacctagcgatgtcagcagtgttgtcacgttcctagcttcagagggagcccgttatatgacaggccaaacgcttcatattgacggcggaatggtgatgtaagttttttctcgaaaatttcatcgtagtttctctagttttttaaaaacgaatccactataatacttgaggggaggtgaattgctatggcagacacattagagcgtgtaacgaaaatcatcgtagatcgccttggcgttgatgaagcagacgtcaaacttgaagcttctttcaaggaagacttaggtgctgattccctagatgtagttgagcttgttatggaacttgaagacgagtttgatatggagatttctgacgaagatgctgaaaagattgcaacagtcggcgacgctgtgaactacatacaaaaccagcaataagctgatgctaaaagtcccgccgaaacgcggggctttagccctttattcgtgcagttattacagcatgccgcttttacgcgcgctgtatccggtttagtcagagaagcgcggtgaacctgatgtgcctatggaggttactatgtcaaaacactcacattataaagataaaaaaaagttctataaaaaagtagaacaatttaaagagtttcaagaacggatttcggttcactttcaaaatgaaaagcttttgtatcaagcatttacacattcatcttatgtgaatgagcatcggaaaaagccgtatgaagataatgaaaggcttgaatttttaggtgacgctgttttggaactgacgatctccagattcttatttgccaaatacccggctatgagtgaaggagatttgacgaaattgagagccgcaattgtttgcgaaccgtctctcgtttcattggctcacgagctgtcattcggcgatcttgtcctgttgggtaaaggcgaggaaatgacaggcggaagaaagcgtcctgctctattggcggatgtttttgaggcatttatcggagccttgtaccttgaccaaggattagagccggtcgaaagtttcttaaaagtttatgtgttccctaaaattaacgatggtgctttttctcatgtgatggatttcaaaagccagctgcaggaatacgtgcagcgggacggcaaaggctctctggagtataaaatctccaacgaaaaaggacctgcgcacaaccgtgaatttgaagccatcgtatctctaaaaggtgaaccactcggagtcggaaacggccgttcaaagaaagaagccgaacagcacgctgctcaggaagctttagctaaattgcaaaaacaccatacgaaacaataaaatcccccttatgactcagggggatttcagtatgtatgccgtcttatttgaccaatgtttatgatagaattgaaatacttattacataaggaggatcgctatgttcctcaaacgtttagacgttataggatttaaatcatttgcagaacggatttccgtagacttcgttaaaggcgtgacagcagttgtcgggccgaacggaagcggaaaaagcaacatcacggatgccattcgctgggttctcggcgaacaatcggcacgctctcttcgcggcggaaaaatggaagacatcatttttgccgggagtgattcaagaaagcgattaaatctagctgaagttacgcttactcttgataatgatgatcatttcttgccaattgacttccacgaggtgagtgtcacaagacgtgtgtacagatcaggtgagagtgagtttctgattaacaatcagccatgccgcttgaaagatattattgatttatttatggactctgggcttggtaaagaagcattttctattatcagccaagggaaagtggaagagatcctgagcagtaaagcggaggatcgccgcagtatctttgaagaagcggccggggtgcttaaatataaaacgagaaagaaaaaagcagaaaataaactgtttgagacacaggacaatctaaatcgggtagaagatatattacatgagcttgaagggcaggttgaacctcttaaaattcaagcttcaatagcgaaagactaccttgagaaaaagaaagagctggagcatgttgaaattgcgctgactgcctatgatatcgaagagctgcatggtaaatggtcgactcttaaagagaaagtgcagatggcaaaagaagaagagcttgctgaatcgtctgctatttctgcgaaagaagcaaagattgaggatacaagggacaaaatacaagcgcttgatgagtcagtagatgagctccagcaagttttactggtaactagtgaagagctggaaaagcttgaaggccgtaaagaagtcctgaaagaacgaaagaaaaacgctgtgcaaaaccaagaacagcttgaagaagccatcgttcagttccagcaaaaagaaacggttctgaaagaagagctttcgaagcaggaagctgtcttcgaaacgcttcaggctgaggtgaagcagttaagggcgcaagtaaaagaaaaacagcaggctctcagtcttcacaatgaaaatgtcgaagagaaaatcgagcagctgaaaagtgattattttgagctgttaaacagccaggcttcgatacgcaacgaactccagcttcttgatgaccagatgtcccaatccgctgtcacattgcagagactcgcggacaacaatgaaaagcacctgcaggaacggcgtgatatttctgcgcgtaaagccgcatgtgaaacggaatttgcccgaattgagcaggagattcacagtcaagtcggtgcatatcgtgatatgcagacaaaatatgagcagaaaaagcgccaatacgaaaaaaatgaatccgctctgtatcaggcataccaatacgttcagcaagcgagatcaaaaaaggacatgcttgagacgatgcagggagatttctccggcttttatcaaggtgttaaagaagtgctgaaagcgaaagagcgccttggcggaattcgcggagcggttcttgagctgatttctacagaacagaagtatgaaacggccattgaaatagcgctcggcgcttctgctcaacacgtcgtgaccgacgatgaacaatctgcccgaaaagcgattcaatatttaaagcagaattccttcggccgggcgacgtttctgcctctttctgttattagagaccgccagcttcaaagccgtgacgcggaaacagccgcccggcattcatcatttctcggggttgcaagtgaacttgtcacatttgatcctgcgtatcgaagcgtcatccagaatcttcttggaaccgttctgatcacagaggacttaaagggtgcaaacgagcttgcgaagcttctcgggcaccggtaccgcatcgtaacccttgagggagatgttgtgaaccccggtggttcaatgacgggcggcgcggttaaaaagaaaaataactccctcctcggaagaagccgggagctagaagatgtgacgaaacggctcgctgaaatggaagagaaaacagctctgcttgaacaagaggtcaaaacccttaaacaatccattcaggatatggagaaaaaactggctgacttaagagaaaccggggaaggcttaaggttaaagcagcaggatgtgaaaggccagctgtacgaacttcaagttgccgagaaaaatatcaatacccatttagagctctatgaccaagaaaaatctgctctgtcagaaagcgatgaagagaaaaaagcgcgcaaacgcaagcttgaagaagagctctctgccgtatctgaaaagatgaaacagcttgaagaggacatagacaaactgacaaaacaaaaacaaacgcaatcctcaacgaaagagtctctttccaacgagcttactgagctgaagatcgctgcggccaaaaaagagcaggcatgcaagggggaagaggacaaccttgccagattaaagaaagagctcactgaaacagagattgcgttaaaagaagcaaaagaagacttaagcttcttaacgtcagagatgtcatctagcaccagcggcgaagaaaagctggaagaagcagcaaaacataaattgagtgacaaaacgaaaacgatcgaactgattgcattaaggcgcgatcagcgcatcaagcttcagcatgggcttgatacgtatgagcgtgagctgaaagaaatgaaacgcctgtataaacaaaaaacaacgctcttaaaagacgaagaagtcaaactcggacgaatggaagtcgagcttgataatttactccaatatttacgggaggaatacagcttgtcctttgagggggcaaaagagaaatatcagcttgaaactgatccagaggaagccagaaagcgcgtgaagctgattaaactcgcaattgaagagctgggtaccgtgaacctcggaagcatagatgagtttgagagggtcaacgaacggtacaagtttctgtcggaacaaaaagaagatttaacagaagcgaaaaataccttgttccaagtgattgaagaaatggatgaagaaatgacgaagcgctttaacgacacattcgttcaaatccgctcacactttgatcaagtttttcgctccttattcggaggagggcgagctgaactgaggctcaccgatcctaacgatctgcttcattcaggagtcgagattatcgctcagccgccggggaaaaagctgcaaaacttaaacctcctgtcaggcggagagcgtgcgcttactgctatagcgctcttattctcaatcctaaaggttcgtccagtgccgttttgcgtccttgacgaagtagaggctgcgctcgacgaagcgaatgtgttccggtttgcgcagtatttaaaaaaatacagcagtgatacccagtttattgtgattacccacagaaaaggaacgatggaggaagcggatgtgctttatggcgtaaccatgcaggaatccggtgtttccaaggtaatctccgttaagctggaagaaacaaaagaattcgttcagtaacgaggaaagaggttaaaagatgagcttttttaaaaaattaaaagagaaaatcacaaaacagacagattccgtatctgaaaagtttaaggatggccttgaaaaaacaagaaactcctttcaaaacaaagtgaatgatcttgtatcccgttaccgtaaagtggatgaggatttcttcgaagagcttgaagaggttcttatcagcgcggatgtcggttttacaaccgttatggaattaatagatgagctgaaaaaagaagtcaaacgcagaaatattcaagatccaaaggaagtccagtcagtgatttctgagaaactggtcgagatttataacagcggagatgagcaaatttcagaactgaacatccaggatgggcgtttaaacgtaatccttctggtaggtgtaaacggtgtcgggaaaacaacaacgatcggaaagcttgctcataaaatgaaacaagaaggaaaatctgtcgtacttgccgccggagacactttcagagcgggagccattgaacagctggaagtatggggagagcgtacaggagtgcctgtcattaagcagacggccggaagcgatccggcagctgtcatctacgatgctgttcatgctgcgaaagcaagaaatgccgatgtattaatttgtgatacggcagggcgtctccaaaacaaagtaaatctcatgaaagagcttgaaaaagtaaaacgtgttatcgaaagagaagttcctgaagctccgcatgaggtgctgcttgcccttgatgccacgaccggccaaaatgcaatggctcaggcaaaagaattctctaaagcaacaaatgttaccggcattgctttaacgaagcttgacggtacggcaaaaggcggtatcgtccttgcgattcgcaacgagcttcacatcccggttaaactagtcggtttaggagaaaaagttgatgaccttcaggaatttgatccagaatcctatgtgtacggactcttttcagatttagtggaaaaagccgacgattaagaaaaaggccccaacatcttggggcctttttcttttttatcttcttacttgataggcgaaatgataaaggctgttatcagtggataccagtcttgactcaccagaaaaaactctgaatgggatgatgtcatagtaatgaacggaaacagatgtgtaatacgtatagtaaccagcagctggccccaaatacattggaacctcaaatgttccgtttgcatcagttgttcctgaagcagtttgtgttgtgtttccgaccttcgtgtccgcttcaaatcttacgggcgcgtttggcactggctgtccgttttggtcgagtaatttgccgcttactgtaatattgtacttgactcgccaatattgaccttgcccgtaattgattttaccgtatacccctccatctgtgctgatatttgtgattgaggccttataaggtgcctcagcagcgtctgcttgctgtgccgggaaacctattgtaaacagggctgccagacacaacataaacaataaaccgatttttttcataaaaatcctccttaaaatagggttcatatacaatatcggaataaattggatgatatttagcgtattttggaaaaggttaatcgtcgctttgacaagataaaaacttgacagtgtcaataaaaccgtgtaaactaagttatcgtaaagggatttgacttaacaaaggggagagctcaaatgtcactcgaaaagacaacgagaatgaattatctgtttgatttttatcagtcgttgttgacgtcaaaacagaagagctatatgtcgctttattatttggacgatttctccctaggcgaaatagccgaagaatatgaggtttcaagacaagctgtttatgataacatcaaacgaacagaagcgatgcttgaacaatatgaagaaaagctgctccttttgaaaaagtttcaggagcgtaaagagatgtttaataagctgaaggagcttgcttccggttcaaaagaagaggaagaaattacagctctgattgaagcgcttgagaaattagattaggaggcggcaaactatggcatttgaaggattagccgaccgactgcagcagacgatttctaaaatccgcggaaaagggaaagtcagcgaacaagatgtaaaagatatgatgcgtgaggttcgtcttgcgctgcttgaggctgacgttaactttaaagtagtcaaagattttgtcaaaaaagtaagtgaacgcgctgtaggccaagacgtcatgaaaagtctgacgcccggccagcaggtcattaaagttgttcaagaggaactgactgagctgatgggcggcgaagagagcaaaatcgccgtcgcaaaaaggccgccgactgttattatgatggtcggtctccaaggtgccggtaaaacgacaacaagcggtaagcttgcgaatctgctgcgcaaaaagcataatcgcaaaccgatgctggttgctgccgatatttaccgcccagccgcaattaagcagctggaaacactcggcaaacagcttgatatgcctgttttttctcttggcgatcaggtcagtcctgtagaaatagctaaacaggctattgagaaagccaaggaagaacattatgactatgtcattttggatacggcaggccgcttgcatatcgaccatgaactgatggatgaactgaccaacgtcaaagaaatcgcgaatccggaagaaattttcctggttgtcgattcaatgaccggtcaggacgctgtgaatgttgccaaaagctttaatgaacagctcggtttaaccggtgttgtgttaactaagctggatggagacacacgcggcggggctgcgctttctattcgcgctgtcacaaacacgccaattaagttcgcaggtttgggcgaaaagcttgatgcgttagagccgttccaccctgaacgcatggcatcaaggattctcggcatgggcgacgtgctgacattgattgaaaaagcacaggccagcgttgatgaagacaaagccaaagagctggaacaaaaaatgagaacgatgagcttcacattggacgattttctggagcagctcgggcaagtcagaaacatggggccgcttgatgagcttctgcaaatgatgccgggtgcaggtaaaatgaaaggcctgaaaaacatccaagttgatgaaaaacagctgaatcatgtggaagcaatcattaaatcaatgactgttcttgaaaaagaacagccggatatcatcaatgccagccggcggaagcggattgcgaaaggaagcgggacatccgtacaggaagtcaaccgtctgcttaagcagtttgatgaaatgaaaaaaatgatgaagcagatgacaaacatgtcaaaaggcaagaaaaaagggtttaagctaccttttatgtaatcggttatacatgataaaaccgttgttaagaaaaaacactttacaaacacttttatcattgttaatatactatcttgttgaaatattttcggaggtgctagtaaaatggcagtaaaaattcgtttaaaacgtatgggagcaaaaaaatctcctttctatcgtattgttgtagcagattctcgttcaccacgtgacggccgtttcatcgaaacagtcggaacttacaacccggttgcaaaaccagcggaagtaaaaattgacgaagagcttgctcttaaatggcttcaaactggagcgaaaccatctgatacagttcgcaacttgttctctagccaaggaatcatggaaaaattccacaacgctaaacaaggcaagtaatgactgatcaacacttggaagatttgattgtccacattgtgacgccgcttgttgatcatccagatgacattcgcgtcataagagaagaaaccgatcaaaagattgcgctgcgcttatctgtccataagtcagataccggtaaagttatcggaaagcaaggccggactgcaaaagcgattcgaacagctgtatttgcagctggcgcacagtcttctaagaaagttcaatttgaaatatttgactaaaagggagagggccggcacctcccctttttttacacgcaaaaaaagggtaaactgatagaagcttaggcaaaatagaaaagcctgggcgagtaaaagttttaaaagcggggagcttggtgcgatgcaaattattcaccgtgtagccgttatgcaagtcttaaccgagcgcagtaaagaaaagcttttagcttcttttgccgaaaagaaacaaatgcttgaacgagaatgcagccagctctattttcagcttagaaaacatgagaaagaacagcaaaaccctgatatgatagaacaatttaaaaaggcaatagaaaagcgaaaagatgatatgaaaatcatcgattttcaaattgctcaagtacatacattgcagcttggcagtgagttgaaagaaaaggaagtcgatgcgctgctgacgattgaagccggggatgactggcatgagaaaacagcagcgaacaccatcgtcataaaagacggaaaagtaattgaaattcgccagaggtgatcatatgacaaagcgatggtttaatgtaggcaaaatcgtaaatacccacggaatcaaaggcgaagtgcgggtgatttcaaaaacagattttgccgaagaacgatacaagccgggaaacacgctgtatttgtttatggacggccgtaacgaaccagtggaggtaacggtaaacacacatagactgcataagcaatttcatctcctgcagtttaaagaaagacaaaacctaaatgaagtagaagagctgaaaaacgcaatcattaaagttcctgaagaagaattaggagagctgaatgagggtgaattttatttccacgaaattattgggtgtgaagtatttactgaagaaggcgaactcatcggaaaggtcaaagaaattttgacgcctggagccaatgacgtttgggtcatcggacgaaaaggaaaaaaagacgcactcattccttacattgaatcagtggtcaaacatatcgatgtcagggaaaagaaaattgagattgaactcatggaagggttaatagacgaatgaaaatcgactttttgacgctgtttcccgaaatgtttgaaggcgtgctcggctcatcgattcttcaaaaagcccaggaaaaagatgcggtgcagtttcaagtcgtaaatttccgggagtactctgataacaagcacaatactgttgatgattatccttatggcggcggggcaggcatggttctcaagccccagcctgtttttgacgcggtcgaggacctgacatcaaaggcagccgctgctccgcgtattatcctcgtatgcccgcaaggtgagcgttttacccaaaaaaaagccgagcaattagcaaaggaagagcatttgctgttcatttgcggccattatgaaggctatgatgaacgcattcgcgagcacttggtaacggatgaaatatcaattggcgactttgttctgacgggcggtgagctccctgcaatgatgatcgcagacagtgtggtcagactgcttccgggtgtactgggtaaagaggcttcccatattgaggattccttcagcaccggacttttagagcacccgcattatacaagaccggcagattacaaaggtttaaaagtgcctgaaacactcttgtcaggaaaccatgcaaaaattgaagaatggcggaataaagaatcgatcagaaggacctacctaagacgtccggatctgttgaaagactacccgcttacagagcagcaaagaaagtggatttctgaatgggaaaaagaatagattttattgcataggctatgaaattgtgataagatactacttgtggcttaagcgggcttatccgctgcaagcttgaaaacgatgttccgctgtgccggtttttgtggccaagagcatctgttggaaggagttgaaaacgatgcaaaaactaattgaagatatcacaaaagaacagcttcgtactgatcttcctgcgttccgtcctggtgacactttacgtgtacacgttaaagttgttgagggtaaccgtgagcgtatccagatctttgaaggtgttgtgattaagcgtcgtggtggtggaatcagcgaaacgttcacagttcgtaagatttcttacggtgttggcgttgaacgtactttcccagtacacacaccaaaaatcgcgaaaatcgaagttgtacgttacggtaaagtacgccgtgctaaactttactacctgcgtgaacttcgcggaaaagcggctcgtattaaagagatcagacgataatgataacgaacgaaaagagcttgttacctgtaacaagctctttttttatacagaatttgaaaatgccggacaggcatcgtaaaatacataaaggacaacaatgaatcatgcatactgaagataaaggcggtgttcgtgtcacatgacaattcaatggttcccgggccatatggcaaaagcaagaagggaagtaaccgaaaaattaaaattaatcgatatcgtatatgaattggtagatgccagaattccaatgtcatcaagaaacccaatgattgaagatattctaaaaaacaagccgcgaattatgctgttaaacaaggctgacaaagcagatgcggcagttacacagcagtggaaagagcactttgagaagcaggggatccgctctctgtctattaattctgtaaatggacaagggttaaatcaaattgtgcctgcatcaaaagagatcctccaagaaaaatttgaccggatgcgtgcgaaaggtgtgaagccgagagcgattcgcgctttgattatcggcattccaaacgtcggaaaatcaacactcatcaaccggcttgcaaagaaaaacatagcaaaaacgggagacagacctggtattacaacctctcaacagtgggtcaaagttgggaaagaattagagctattagatacaccgggaattttgtggcctaaatttgaggatgagcttgtcggtttgagactggcagtcaccggggctattaaagactcgattatcaatttgcaggacgtggccgtgtttggtcttcgttttctcgaagaacattacccagaacggctcaaggagcgttatggccttgaggagatcccagaggacattgccgagctgtttgatgcaataggtgaaaagcggggctgtctcatgagcggcgggctcattaactacgataagacgactgaagtcatcattcgcgatattcgcactgaaaagttcggcaggctgtcatttgaacagccgacgatgtaaaggcgcgcagaaatgcgggtctttattttttcttggctgaaccgatacatacagtaagggagaagagaaagtgaatacattaaccgtaaaggacattaaagaccgtttgcaggaagtgaaggatgcacaagacccatttatttcccaatgcgaaaacgacccgagaaaaagcgttcaaacgcttgtagagcaatggcttaaaaagcaagcgaaagaaaaagcgctgaaagaacaatgggtgaatatgacttcctatgaaaggctggcaagaaacaaaggatttcgcttgattgcaggtgttgacgaggtcggccgggggccattggcaggaccagttgtcgccagcgcagtcatccttccagaggaatgtgaaatacttgggctgacagactccaaaaagctttcagagaaaaaacgcgaggaatattacgagcttattatgaaggaagcactggcggtcgggataggaattgtagaagctactgtgattgatgagatcaatatatatgaagcttcaaaaatggcaatggtgagagcgatacaggatttgtcggatacacctgattatttgcttgttgacgcaatgacacttccgctcgacacggctcaggcgtcaattataaaaggcgatgccaaaagcgtgtctattgcggcaggtgcgtgtatcgcaaaagtgacgagggaccgaatgatgagcgcttatgccgaaacgtatcccatgtacggctttgaaaaaaataaaggctatgggacaaaagaacatttggaagctctcgctgcatacggcccaactgaattgcaccgcaaaactttcgctcctgttcaatctttcagataaatcaccatggacaaggaggcacctttttaaaatgaacatacgaaatgatgtgcaaaaggcgctgcagcaccttttcgggcgtacagccgtcccgcaggaaacatcaaaagtaaacgaagcgctaaacggggagaagcgtctcctcttaggaaaagtgcttcgtttactaggagatcagcatgccctgatccaagtcggcaatcaaactgttcagggaaaacttgaaactcagcttcgtcctcaggcatactattggttttcctacgaaaaaaaaacggcagagcaaacaggccgtcttcaggtcgttcaaagctttgatcaaaatcctaaaaccattcaggatgcagctggcaaacttttaaatgctatttcagtgaagacgtcaaacgcagctctcatgatgacaggagcgatgctgaaaagcaaaacacccgtaacagaaaatgatatcaaaacagctgtccgctggatggacacgctgccttcgcaagacacaaaaaaagcagttgaaacggttctcttcgctttaaagcgtgatcttcccattcactccgagattttgaatggtgttcacgctgtgaaatcgcctgttccgttgcatcagcacgtatcccagctgctacaggcaatcgaccaaaaccctcagcagagccaaatgatgtcaaagctaaaggaagcagttacggtgcttttaaatagtgaaatcgatgtccatgcagaacggctgattgataagcttatttctttaaccgacaatacgaaagcaccttctccgacgaatacagctggaagcagggagcttagcacaccagctggctcccccggaaaagccagcctgccgattgcaaatcacacagcagaacagggaagcatacaagaagagcctgttaaaacagcagcagacattccaattaaagaagcccgccagctgctcgtgaagctgacggaatctgctgaaaaaaacagtctccaaattgtgaaagaagcagcaaattggattaaagcggctgcttcatcgggtgatagtaagtcacttgcagcttcagctgttttacaagcggcacaagtcacagaccaggaagccgaagtctttttaaaggctgttcagcagacagcaccccatttggcggataaggcagatgttctttctttcttatccaaagtgaaaacggcaatcggcgcaagggacgaggttgcgttcattaaagcgtttgaacaaggaagcgcagtcacatctggcgaaatgcaatccatcaagctggctctttctgccttaagagcatcgcatgaggtagccgaaccagtcaaacaagaagccgatcagctttttcataaattaaatggccagcttttcatgcagcaggaccatccatcatacagccaaattgtaatgtcatttccgatgttttcgaagtcaggggttcaggacatgactgttctgtttaaaggaaagaaagaagcggatggaaagcttgatccttcccattgccgccttttgtttttgctgcagcttgatacactaaaagaaaccgtcgttgattgcttggtacagcaaaaagtcatgaccattacaatagagactgatttcgagctgcaggctgcgatcgatccgatggtgcccgcgcttaaacaggggctaaaggaaatggggtacagcctttcaggggtaaacgctaaaaaaagggttcacaccgaagaaaaggcttcaatcgatcaatatataacaagtatcagtgatcaggaagtggatgtgaaaatatgaaagagcagacaccgatcagaaaagctgttgctctccattatgacgaacaaaaagacaaggcgccgagagtgattgccacagggaagggccatgtagctgacaacattatcaaagaagcgaaaaaagcaggggtcccgattcaagaagatcggacccttgtcgaattaatgcgccatttgacggtagatgatcaaattcctgaagctctttatgaaacggtagccgagattttttcattcatttacaaattggacgaaagcgtaaaaaacgaaaaatagctaaaatattccccatcctcctttgaaatttatgtttttaataaagtaaaagtttgaatgtttagaaggattaaaagattttgcatcgaactgtagacaattcttccagtattattatagaatgaaagcgcagtctattttagttttgttacataagttaggaggatgggaaatgaatatccatgagtaccagggaaaagaagtcctcagaaaatatggggtatctgttcctgaaggtaaagtggcttttacagcagaagaagcagttgagagtgcaaagagcttatccagctcggtttatgtcgtaaaggctcaaattcatgctggcggtcgaggcaaagctggtggggtaaaaatagcaaaatcattagacgaagtaaaagcgtatgccgaagaactattagggaagaccctagttacacatcagacgggtccggacggccaagtaataaaacgcttacttattgaagaaggctgcgatattaaaaaagaatattacatcggtctagtgcttgaccgcgccacttcaagaatcgttttgatggcttctgaagaaggcggaacggaaattgaagaggttgcggagaaaacaccggaaaaaatcaaaaaagctgtcattgatccggctgttggccttcaaggctatcaagccagagaaattgcattcgctattaatattccaaaagagctcgtgggaaaagctgctaaatttatgcttggactatataaagcgtttgttgagaaagactgctcaatcgccgaaatcaatccgcttgttgttaccggcgacggaaatgtgatggcgcttgatgcaaaattgaattttgacagcaatgcgttgtaccgacaaaaggacattatggaatacagagatttggatgaagaagatccgaaagaaattgaagcgtccaaatatgatctaagctacatttcccttgatggaaatatcggctgtatggtaaacggcgcggggcttgcaatgtccacgatggatattatcaagcattatggaggagaaccggccaacttccttgatgtgggcggcggtgcaaccgctgaaaaagtcacggaagcatttaaaatcattctttctgatcaaaacgttaaagggatttttgtcaacattttcggcggcattatgaaatgtgatgtcatcgcagaaggggttgttgaagcgactagacaagttggtttgacattgccgcttgtcgtccgtcttgaaggcacaaacgtggatctagggaagaaaatccttagtgaatcaggattaaacattacatctgcggaatcaatggctgacggcgcgcagaaaatcgtatccttagtttaagaaagaatgaaaggcaggggaccaaataatgagtgttttcattaataaagatacaagagttattgtgcaagggattacaggttctaccgctttatttcatacgaagcagatgcttgaatacggcacaaatatcgttggcggtgtaacacctggaaaaggcggaacagaagcggaaggtgttcctgtatttaatacagtggctgaagcagttcaaacaaccggcgctaacgcgtctgttatatatgtgcccgcaccgtttgcagctgatgcgattatggaagcggtagatgcggagcttgatctcgtgatttgtatcacagaacatatcccggttttggatatggtgaaggtcaaacgcttcatggaaggcaagaaaacgagactgatagggccgaactgtcctggtgtcattacgcctgaagaatgtaaaatcggcattatgcccggatacatccataaaaagggtcatgtaggcgttgtatcacgttcaggaacattaacatacgaagcggtgcaccagctctcagaagcgggtgtagggcaatctacagctgtgggaatcggcggcgaccctgtaaatggaacaaactttattgacgttttaaaagcgtttaacgaagatcctgacactcacgcagtcatcatgattggcgaaatcggcggtactgccgaagaggaagcggcagagtgggtaaaagccaacatgacaaaaccggtagtcggttttatcggcggtaaaacagcacctcctgggaagcgcatggggcatgcaggcgccattatttccggcggaaaagggacagctgatgaaaaaatcaaaacccttaatgcatgcggaatcgaagttgcagagacaccttctgtcatgggtgaaaccttaatcaaggtgctgaaagagaagaacttgttcgaaacttgcaaaacgcattaataaaaaagggacagccgtcaaggctgttcctgctttttctaacaaaaggaggtcaatctattggatcaggccgctgcctgcctaacgatttgcagaatcaatcaattattatccccatcccttctattaaaatggtggaaagccgatccgtctatgtcgctgacatcacccgtgttacaaacggttactcgtgatcaaataaaagcagctgcattaaaaaacgaaatagaacaattttatccaaagctcccgcgtgtacttgctgcttatcgtgagcaaggcattaacaccatccctatttcttcaaagcaatatcctttctggcttaaaagcatttatgatccccctgccgtactgtttgcaaaaggtgatatgactcttctttcgaaagggagaaaaattggaattgtagggacaagaaatccaacagcttatgggaaacaagttgtcaatcatcttacaaaagagatctgtcgtaaaggttgggtgattgtcagcggactggcgtctgggatagacggaatgtcccatgctgcaagtattaaggcgaaggggcggacaattggcgtcattgcaggcggatttcaacacatttatccccgagaaaaccttcagttagcagatcacatggctaaacaccatatcctgctgtcagagcacccacctgaaactaaaccccaaaaatggcatttccctatgagaaaccgtattatcagcggactaagtgaaggcgttattgtcgttcagggcaaagaaaaaagcggttcgctgattactgcctatcaagcattggaacaagggagagaggtatttgccgtacccggttcattgtttgacccttacgccggaggtcctataaaactgatccagcagggggctaaagccatatggtcagcagaggatattttcgaggaacttcctgagagaaacgttcaatatacggaacccttttgaattatcgtttgacaaacggtattgtaatatttaataatagtgaggatttaaagttgcatattgttttctatttaattaatgacgttcatgataaagaatgaaatgttgaaagccaaataaagacagctgcaaaaataaaattgaaatatcttgaaaagagagagaacacctcttgagggggatgaaaatgtctgattatctagtcatcgtggaatcgcccgctaaggcgaaaacgattgaacgttacttaggtaaaaaatataaagtaaaagcatcaatgggacatgtccgggatcttccaaaaagtcaaatgggagttgacatagaacagaattttgaaccgaaatatattaccattcgaggtaaaggcccggtattaaaagagctgaaaacggctgcgaaaaaagccaaaaaagtgtatctcgcagccgaccccgacagagaaggggaagcgattgcatggcatttggcacacagtcttgatttagatctcaactcagactgccgtgtggtgtttaacgaaattacaaaagacgctattaaggaatcgtttaagcatccccgcatgatcaatatggatttagtggatgcacagcaagcgagacgtattttagacaggcttgtcggatataaaatcagtccaatcttatggaaaaaagtcaaaaaagggcttagcgcaggacgcgtgcaatccgttgccctccgtttgattattgaccgtgaaaaagagattaacgactttaagcctgaggaatattggacaattgacggtacgttcttaaaaggtcaagaaacctttgaagcgagctttttcgggaaaaacggcaaaaaacttcctttaaatagtgaagctgatgtaaaagagattctttctcagctcaaagggaatcaatatacagttgaaaaagtaaccaaaaaggaacgcaaacgtaatcctgctttgccttttaccacttctaccctgcagcaggaagcggctcgcaagctcaatttcagagcgaagaaaacgatgatgattgcacagcaattatatgaaggaattgatttaggaagagaaggaacggttggtctgatcacgtatatgagaacggattcaacccgtatttcaaatacggctgttgatgaagcagctgcatttattgatcagacatatggaaaagagttcctaggcggaaaacggaagcctgcgaaaaagaatgaaaatgcccaggatgcccacgaagcaattcggccgacatcagttcttagaaaaccaagtgaattaaaagcagtcctcggcagagaccaaatgagactgtataaattaatttgggagcgttttgttgccagccaaatggcaccggctgttctcgatacaatgagtgtcgacctgacaaacaacggtttgacatttcgtgcaaatggaagtaaagtcaagttttccgggtttatgaaggtgtatgttgaaggaaaagacgatcaaatggaagaaaaagaccggatgctgcctgacttacaagaaggcgacacggtattatcaaaagatatagaacctgagcagcattttacccagccgcctccgcgatatactgaggcccggcttgttaaaacccttgaagaacgcggtatcggccgtccatccacatatgctccgacacttgatactattcagcggcgcggctacgtggcattggataataaacgtttcgttccgactgaattaggtcagatcgttcttgacttgatcatggagtttttccctgagatcattaacgttgagtttacagctaaaatggagagagatcttgatcatgttgaagaaggaaataccgaatgggtcaagattatcgataatttctacaccgattttgaaaaacgcgtcaaaaaagccgaatcggaaatgaaggaagttgagattgaaccagagtatgctggagaggattgtgaattgtgcagttctccaatggtatataaaatgggacggtacggtaaattcttagcttgctccaacttccctgactgccggaacacgaaaccgattgtgaaacaaatcggtgtgaagtgcccgagctgcggagaaggaaacattgttgagcgaaaatcgaaaaagaaacgggtgttttacggctgtgaccgttatccggactgtgaattcgtatcatgggacaaaccaattgaacgaaaatgcccgaaatgcggaaaaatgctcgtcgagaaaaaactcaaaaaaggtatacaagtccaatgcgtggaatgcgattataaggaagaaccacagaagtagcggtgagcagggtcttgctcaccttctttgtgtgttaaaagaaggccttgaataataaaataggagatgtgaaagatgaaccaacaaacagtgaatgtaatcggagccggactcgcaggaagtgaagcagcatggcagcttgccaaacgtgggattcaagtcaaattgtatgaaatgcggccagttaaacaaacgcctgcgcaccatacagataaatttgctgagcttgtctgcagcaactctcttcgctctaatacacttgctaacgctgtcggtgtattaaaggaagaaatgcgtgcgcttgattcagccattatcgctgcggctgacgaatgttcggtgcctgccgggggcgctcttgcagtagaccgtcatgaatttgccgcaagtgtgacaaatcgggtgaaaaatcatccaaacgtaaccgttattaatgaagaagtgactgaaattcctgaaggccctactatcatcgcaacgggtccgttaacatctgaatcgctgtctgcccagctgaaggagctgactggagaggactatttatatttttatgacgcagcggcgccaattgtagaaaaagacagccttgatatggataaagtgtacctaaaatcccgttatgataaaggtgaagcagcatatttgaactgcccgatgacagaagaagagtttgaccgttttcatgaagcattaacatcagcagaaacagtgccgttaaaagaatttgaaaaagagattttctttgaaggctgcatgccgattgaagttatggcaaaacggggtaagaaaacaatgcttttcggtccgatgaaaccggttggtctagagcatcctgttacaggaaaacgcccttatgccgtcgttcagctcagacaggatgatgctgcgggaacactttataatattgtaggattccagactcatttaaaatggggagaccaaaaggaagttctcaagttgattccaggacttgaaaatgtagaaatcgtcagatatggcgtgatgcacagaaacacatttattaactctccaagcctgttaaagccgacttatcaatttaaaaaccgcagtgatctgttctttgcaggccaaatgacgggagtagaaggatatgtggaatcagctgcctcaggacttgtagcaggcattaatgcggcgaagcttgtattgggagaagagcttgtgatcttccctcaggaaacagcaattggcagtatggcacattatattacaacaacaaaccagaagaacttccagccgatgaatgcaaactttgggcttttgaaagaattgccagttaaaattaaaaataaaaaagaacgaaatgaacaatacgcgaaccgtgcgattgaaacaattcaaacaatttcgaaaacaatataggtattgattgcaacctgagcgcgatttgtgataccatttaaaagcccttcctggggaggtattaggcatggagaatgttaagaatttcgtaaagttattcgttgaatatttacaaattgaaaaaaattattcacaatatactattgtgaattatgtggattcaattgaagaattcgagactttcctgcgcgttcaaggtataaatggatttgaagaagctgcatatcaagatactaggatttttttgacagaagcctatgaaaaaggtttatcgagaagaacaataagcaaaaagatatctgcattaagaagcttttataagtttctgatgcgggaaaagcttattgaagaaaatccgtttcagcttgttcatctgccaaaacaggagaaacggataccgaagtttctatatcaaaaagagcttgaggagctgtttgaagtttcagatataagccagccggccggaatgagggatcaagcgctgttagagctgctctatgccaccggaatgagggtcagtgaatgctgttccataactattaacgacgttgatttatttatggacactgtgcttgttcacggtaaaggcaagaagcagcgctatatcccctttgggtcttatgcccgcgaagcgttgaaggtatacatgaatagcggaagacagtgcttgctgatgaaggcaaaagaacctcatgatctattattcgtaaatcaaagaggcggaccgcttacagcccgtggcatcagacatattttaagcgggcttgttcaaaaagcgtcaagcactttacatatccatccgcatatgcttcgacatacgttcgccacgcatctgttaaatgaaggagcggatttgagaagcgttcaagaactgctcgggcattccaatctgtcttctacacagatatacacgcacgtttcgaaggaaatgttgagaaacacatatatgtctcaccatccaagagcatttaagaaaaattaaaggaggccctttatgtcatcttttcatgcgaccacaatatttgccgtacagcataaaggacgaagcgctatgtccggagacggccaagtaacatttggtcaggctgttgtcatgaaacacacggcacggaaagtgagaaaactgtttaacggcaaagttcttgctggctttgcgggatctgttgcagacgctttcactttattcgaaaagtttgaagctaagcttgaagaatataacggcaacttaaaacgggcggctgttgagcttgcgaaggaatggcgcagtgataaagtgctaagaaagctcgaagccatgctgattgttatgaatcaggatactttgcttctcatatcgggaacaggcgaggtgatcgaaccagatgacggcattctcgcgattggatcaggaggcaattacgctttggcagcgggaagagcactgaaaaagcatgccggtgaaagcatgtctgcaagtgagattgccagagccgcgttagaaacagcaggcgaaatttgtgtttacacgaacgatcaaatcatactggaagagcttgaatagaaaggacttgaggcgcatggaaaaaaaaccgttaactcctagacagattgtagatcggttagaccaatatattgtcggtcagcaaaatgcgaaaaaagctgtcgccgtggcattaagaaaccgctatagaagaagtcttctggatgaaaagctgaaggacgaggtcgttccgaaaaacattttaatgatgggtcctaccggcgtcgggaaaactgaaattgccagacgaatcgctaagctttcaggtgcgccatttatcaaaattgaagcgactaaatttaccgaagtcggctatgtaggcagagatgttgaatcaatggtcagagatcttgtggagacttctgttcggcttataaaagaagagaaaatgaatgaagtaaaggaacaggcagaagaaaatgcaaacaaacgcattgttcgtctgttagttcctgggaagaaaaaacaatctggcgttaaaaatccgtttgaaatgttttttggaggcagccagccgaatggtgaagatgaggcggagagccaggaagaagcaaacatcgaagaaaaaagaaaacgaatggcacatcagctggctttaggagagctcgaagactactatgtaacagtagaagtcgaagagcagcagccttctatgtttgacatgctgcagggctcgggtatggagcagatgggtatgaacatgcaggatgcgctgagcggattaatgccaaagaaaaagaaacggcgcaaaatgacagtcagagaagccagaaaagttctgacgaatgaagaagcaagcaaactcatcgatatggatgaagtcggccaggaagcagttcagagagcagaagagagcgggattatctttatcgatgagattgataaaatcgcaaagaacggcggtgcatcttcttctgccgatgtttcaagagaaggcgttcagcgggatatccttccgattgttgaaggttctaccgttgtcacaaaatatggttctgtaaaaacagaccatgtattatttattgcagcaggagcgtttcatatggccaaaccgtctgatttgattcctgagctgcaggggcgtttcccaattcgtgtagaactgaacaaactcacggtagacgacttcgtgagaattttggttgagccggataatgcgctgctgaaacaatatcaggcattattgcagacagaaggtatatctcttgaattttctgacgaagctattcataagattgctgaagttgcttatcatgtgaaccaggacacagataatatcggtgcgagacgccttcatacaatacttgaacgcctattagaagatttgtcgtttgaagctccagatgtaacgatggagaaaataacgattacaccacagtatgtcgaagaaaagctcggaacgatagccaaaaacaaagatttaagtcaatttatattgtgaaaaatttaatatgaggaatgtttaggaggattatttatcatggctttattacaaaaaacaagaattattaactccatgctgcaagctgcggcagggaaaccggtaaacttcaaggaaatggcggagacgctgcgggatgtaattgattccaatattttcgttgtaagccgcagagggaaactccttgggtattctattaaccagcaaattgaaaatgatcgtatgaaaaaaatgcttgaggatcgtcaattccctgaagagtatacgaaaaatctgtttaatgtccctgaaacatcttctaacttggatattaatagtgaatatactgctttccctgttgagaacagagacctgttccaagctggtttaacaacaattgtgccgatcatcggaggcggggaaagattaggaacacttattctttcacgtttacaagatcaattcaatgacgatgacttaattctagcagaatacggcgcaacagttgtcggaatggaaatcctaagagaaaaagcagaagaaattgaagaggaagcaagaagcaaagctgtcgtacaaatggctatcagctcgctttcttacagtgagcttgaagcaattgagcacatttttgaggagcttgacggaaacgaaggtcttcttgttgcaagtaaaattgctgaccgtgtcggcattacccgttctgttattgtgaacgcactcagaaagctggagagcgccggtgttatcgagtctagatcattaggaatgaaaggtacttatatcaaggtactaaacaacaaattcctaattgaattagaaaatctaaaatctcattaatcacaaaaagaaccctttttgagggttctttttttatttcaaataaaggaaatcaataagctttatttcctgggttgaaagtctttctatgtaataattttaataaattttgcatttttcttcaaaaagtttcaaaaatgccgaaaagaaaggagaaaaaacagaaattctgctattttcaggcttatatcaaggcgagaaatgtagttctaacaatctaggactttatacctagttgcaaaatagataattgtgaggacatttttttacacgaacttcatagactttatgcctgttatttcttacaataagcatatagttttacaattctcgacaaggatattgagggtgaaaaaaactgaaatggaggtaagtggatttgagcttattttctggaacgatacaaaatcttgaaaatgccttgagtagagcggatattaagcaaaaagtcataactaataatatcgccaatatagatacaccgaactataaggcaaaaaaagtctctttccaaaatttattagatcaagaatcctcgcgtcttgaagcgataaaaacagactatcgtcatgttgatttttctgatactgattcgaattattcaattgttgcgagcggagatacatcgtatcagcaaaacggaaacaatgttgatgttgacaaagagatgacagaattggcgcaaaatcaaatcaactatcaagctttggttgaaagaatgaacggtaaatttaattcgctgaagaccgtattaacaggaggaaaatgatgacagcttttcatagcttaaatgtttcagcatcggctttaacagctcagcgagtcagaatggacgttgtatcatctaacttagcaaatatggatacgacaagagctaagcaggtgaatggagagtgggtgccttacagaagaaaaatggtttcccttcagtcaaaaggtgaatcgttctcttctattctcaattctcaaatgagcggaagcgggaatgctggaaacggtgtgaaggtttcaaaaattacggaggatgattcagattttaatcttgtctatgatccgacagaccctgatgcaaacgctgaaggatatgtacaaaagcctaatgttgatccattaaaggaaatggttgatcttgtcagcagcaccagatcatacgaggcgaatgtcacggcgatgaatgccacaaagggaatgctgatgaaggcgttagaaatcggaaagtaggtgaatgaatgtgattaatgcaatttctccttttcaggttcaaaatactcaaaacactcaaaatgcaacaaatcaagtaaacaatagccaaaaaacagattcttcaaatcaaacaagcttttcggagcttttaaaaaactctattagttcgttaaatgagtcccaagtagcttctgacaacatgactaatgccttggctgcaggaaaagatgtaaatcttgatgaggtcatgatcgctgctcaaaaagccagcatctctctaactgcagcaacagagttccgcaataaagctgtggaagcttatcaggagattatgagaatgcaaatgtagggggtctgacgatttagagaaagagtggaatgaccgggggttaacatgaatcgtactctaatgcaaatgaaaaacaaaacgagtgagttttggaaaaatagatctaaattacaaaagattttaatggttagtgctttagcggcaattattattattggaattattattagtgtttttgcttcgaattctaaaatggcgccgctgtacaaagatttgtctgccgaagaagcaggacaaatcaaagaagaattggatgcaaaaaaagtgccaaacgaactttcgaatggcggtacagtgattagtgttccggaggatcaggttgattctttgaaagtgcagatggctgcagaaggacttcctaaaacgggatcaattgattattcgttttttggacagaatgccggctttggtttgacagacaatgagtttgatatggtgaaagtgaaagctacacagacagaactgtcaaacttgatcaatgaaatggacggtattaaaaattcaaaagtaatgattaatctcccgaaagacgctgtgtttgtcggtgaggagcaatctgcagcatctgcatcaatcgttttgcagattcaaccgggttatacacttgatcaaagccaaatcaacggattatatcatctggtatctaaaagcgtgccaaacctaaaagaagataacatcgtcatcatggaccaaaattctacatactacgacaaatcagacagcgatgcagggtcctacgcggatagttattcttctcagcaaggaattaagtctcaagttgaaaaagacattcaaaaacatgtacagtcattgctgggtacgatgatgggccaagataaagtcgttgtctccgttacagcagacattgatttcacaaaagaaaatcggacagaagacattgtcgaacctgtggataaagaaaacatggaaggcattgcagtcagcgctgaaaaggtatctgaaacatatcagggcgacggtgcagccaacggcggaactgccggaaccggcgaggaagatgtaccaaattataaggctgacggtgaaaataccgaaagcgggaactatgaaaaaaacagcaacaaaatcaattacgaggttaaccgaattcataaagaaatcgctgaaagtccttataaggtcagagatttagggattcaagtaatggtagagccgcctgatgccaaaaacacagcgtcgctatcaactgaaagacaggatgatatacaaaaaatcctttcaactgtagtcagaacatctttggataaagatgaaacgcaaaatcagaatttatctgatgctgatatcaataataagattgttgtttccgttcagccattcgacggaaaagtcaatttggatacaaatacggaaaaatcctctggtatcccgctgtgggcatatattgtaggcggtgttttaatcgcagcgattattgttctgatcattatgcttatcagaaagaaacgggcgcaagaggatgaatttgaggaatatgagtatgaggttcctcaagaacctatcaatttgcctgatatcaacgaagaggaaaatgaaacagcggaatcagtcagacgaaaacagcttgaaaagatggcgaaagacaagccggaagattttgcaaaactgctgagaagctggctggccgaggattaggaggaattagaaatggcgagacgtgatcaagataagcttacaggaaaacaaaaagcagccattctcatgatttccttggggttagatgtgtcagcttctgtctataagcacttaaccgatgaagaaattgaaaggcttactctggaaatatcaggtgttcgaagcgtcgatcatcaaaaaaaggatgaaatcatagaagaatttcataatatagccattgcacaagattatatttctcaaggcggtttaagctatgcaagacaagttctggaaaaggcgcttggagaggataaggcagagaacattctaaacaggctgacttcttctttgcaggttaaaccatttgattttgccagaaaagcggagcctgaacaaattttgaattttatccagcaagagcatccgcagacgatggcgttaatcttgtcttatttagatccagtgcaggccgggcagattttatccgagctgaatccggaagtacaggctgaggttgcgagaagaatcgcggttatggatagaacatctccagaaataattaatgaggtagaacggattctggaacaaaaattatcttctgcatttactcaggattatacacaaacaggcggaattgaagctgttgtggaagtgttaaacggggtagacagagggacagagaagacgatcttggattcattggaaattcaggatcccgatcttgctgaagaaattaaaaagcggatgtttgtcttcgaagatattgtcacacttgataaccgtgccattcagagagtcattcgcgatgttgagaacgacgatttgctcctttcattaaaggttgcaagcgaggaagtcaaagaaattgtattcaacaatatgtcacagcgtatggttgaaaccttcaaagaagaaatggaatttatgggccctgtacgcttgaaagatgtagaagaagctcaatcgagaattgtaagtatcgtcagaaagcttgaagaagccggtgaaattgtaatagcaagaggcggaggggatgatattattgtctaatatcattaaacaagaatcatctatttctccacaaaaggaaaaaagaaaactttctatacaagaggtgcgtattgatcattctcaccttttgcaggctgaagagaacccggaggcgcttatggcccgagtgaaagaggaagctgatcggatttctgagcaggcaaacagtcatatagaaaatattcgccgtcaaattgaacaggagaaaaacgattgggcggctgaaaaacagaagcttattgaagaagcaaaagccgagggctttgaacaaggagtagcgctgggcaaagctgaggcaatgaaacagtatgcagaactgatcggccaagcaaacagtataactgaaatgtccagaaaagctgttgaggacaagcttgaagacgctaatgaagaaatcgttgagcttgccgttgccctagcaaaaaaagtttggcagcaaaagtctgatgataaagaggctttcctcctgcttgtacaacaggttataaacgaagtgaaggaatatgacgatatatcaatttatgttgatccatattactatgagacaatctttcagcaaaaagatgaaatccagcagcttctttataaagaatgtcggcttggcatatatgctgatgaaaaagctcaaaaaggaacctgttatattgaaactccttttggcagggtagatgcgagtgttgacacacaattgatgcaattgaaagataaacttctgacagcgctggaagcaggtgcagctgaatgaagacacagagtctgatagattgtatagaaatgacagactcgtataaacggtacggaaaagtcaagcgggtcatcggcctgatgattgaatcaaaagggccagcaagctcaattggcgacgtgtgcctgatttatgcaaaaggacaatctgggaaagtcattaaagctgaggtagtcggcttccaggaagaaaatattttgcttatgccttatttagaggctgcgagcattgcacctggcagcattgtagaagctactggggaatcacttcgggttaaagttggaaccggactgattggacaagtcatcgatgcttttggagaaccgcttgacggaaaacttctgcctaaagggctttcgcctgtatcaacggagcaatcaccgcccaacccgatgaaacggccgcctatccgtgaaaagatgggtgttggagtcagatcaattgacagcttgctgacagtcggtaaaggccagcggattggaatttttgcaggaagcggtgtcggaaaaagcaccttaatggggatgatcgccaagcagacagaggctgacttaaacgtcattgcacttgtcggagaacgcggacgagaggttcgggagtttattgaaaaagatctggggaaagaggggctgaaacgatcgattgtagtcgttgccacctcagaccagccagcattaatgagattgaaagcggcatatacagcgactgcaattgccgagtatttccgagataaaggccaaaatgtcatgtttatgatggattctgttacaagggtggcaatggcgcagcgagagattggactggctgcaggagagcctccgacgacaaaaggttatacaccttcagtgttcgctattttacctcgtttactagaacgaacaggtgcaaacgagcatggaaccattacggcattttatacagtgttggtagacggggatgacatgaatgagccgattgccgatactgtacgcggaattttagacggacatattgtgttggacagggcgcttgccaataaaggccagtttcctgcagttaacgtactaaaaagcatcagcagggtgatgtcaaacatttcaacaaaacagcatctggatgcggcaaataaattccgtgaacttttatcgacatatcaaaattcggaagatctcattaatatcggagcttacaaaagaggatcatccagagaaattgatgaagcgatacaattttatccgcagcttattcaatttttaaagcagggaacagacgaaccggctttattggaagaaagcattgctgcattaactagtttgacaggaaatgaggaataaacgtggcttatcaatttagattccaaaagctgctggaactaaaagaaaatgaaaaagaccaatccttatccgagtatcagcaatcagtttctgaatttgaaaacgttgctgaaaaattatatgagaatatgagcaaaaaggaattgctggaacaaaataaggaaaagaaattaaaaagcggcatgagtgtacaagaaatgaggcactaccaacaatttgtctcaaatcttgataatacgatctatcactatcaaaagcttgtcattataaaaagaaatcaaatgaatcaaaaacaagaaattttgacagagaaaaacattgaagtgaaaaagtttgaaaaaatgcgtgaaaaacagtttaaaatgtttgctcttgaagataaagctgcagaaatgaaagaaatggacgatatttcgattaagcagtttatgattcaaggccattaggagcgaatgtaatgtccggcaaaaagaaagaatcaggtaagttccgttcggttttgcttatcattatcctcccgctgatgtttctattaatcgcaggggggattgttctttgggctgctggtatcaatgtcataaagccgatacaggatgctgcggcaaaaacgccggttcttaaagaattggtccctgaaaccgaaaataaaaaaggcgcagcatcaagtaaggatagcagtaatacggcagctctggaaaagaccattaaggatcaaaaaagtgaaatcagtatattgaataaagatttagaaacaagtaaatcagaaatcgataggctcaatcaaaagatccgttcacttgaaaagacggctgaggatcaaaaaaagtcatcagaagatcatactgaaggatcagcagactcgaaagcttcttctgaaaatgacaaagtgatcagtgtgtacaaaagcatggacagcggaaaggctgctaaaattattgcccaattaaaggagcaagaagcactgaaaatattgaatggcctaagcaaaaagcagcttgctgacatattggcgaaaatgactcctgagcaagcagcaacctatacagaaaaaattgctgccagccaagaatagggggaatgaaaggtgaagctgcttgaattagccggacctttgctgcaaaccacaacgggttctgccgctaaaaacatgaaaagtagccaaggagtttttcaaaactggcttatgtctgaggctggattgaaggaactttcagaacaaggaaagggtactcctaattccgaagatcagcttttagcagatgcgcttaaaaagatcggtgactggctaaatgcaagtcctgaagatcaagacaaacaaaatgcggatcttttgcaaacattaagcaaactgacagggaagcaattggatgcgaatgctctgcaaatgttgcaaaatcttttgcaagcagttgaatcaaaaatgtcaggcgggacggatcaattgctcacagaaacggagaaaatcttttcagaagctaaaacggctctgagtgccaatgattctgcttctgacattaatggagcactgaagtctgatacagagcaatcaaatcaggaaaatgaagtatccgagcctgctaaagagcttatctatatccagatgttcattagccagctcgtagaagggaataagctgactgatcgcgggaatggcaatgaagctcatgccatttaccaaaatggagatcaattcctttctgcattagaaaagaagggtgtatctcaacaactaattcaggatcttaaacagcaaatattcactaaagctgagtcaagttcaaaactttactcgatgacagcgtcagagctgaaaagttttcaaagcttaatggatcaaatgtctatgcttcctcaaaaagggaccaaagaatggagtttagctgaaagccagctgaaagccttcttgttatcgaaatcatccgaatcatcacaagactttgggaagcgtgttctcacaccgctctcgcagagttcatccagcaaaaatgcatcggatgtttctggaagtattcagcctgtagatagtaaatcaggactccaaatgctgttttcggggtatcggggcataggaggagttcaaacacttgatctgcagcagatgtcatctgatataccaaatgccgaaacaaaaacggtggctgatcaagtgattaatgcgtggaagcagatgaaatatacgcctttcggcagatcgacgggaagtttcactattcggctgaaccctgaacatttaggatttgtcacaatcaagctgacaaatgaaaatggaatgtttcagagtaaaatcatagcatctagccaatcagcaaaagaattgcttgaacagcatcttcctcagctgaagcaatcattgccgaatatggccgtccaaattgaccgttttactcttccggtccaaagcggggatcagccgatatacggccagcttgctgatgaacagaaacagcagcaagaggggcagagacagcaaagacagaaaaagcaatcaaatgattttggcgatctgctcgatgaagtgtcgatggttgaaatggaggaagaagaatgacttctataagttcagaatataaactgcctgaaaaaacgaacactgtgtcgacgaacaacagcagcttggggaaagacgagtttttaaaaatattaatgactcaagttcaaaaccaagatccgcttaacccgattgacgataaagaatttatcagccagatggcgactttttcaagcttggagcaaatgatgaatctgaatacgacaatgactcaattcgttgaaaaccaagatccgtttacaacgtatgttgattggatgggaaaagaagtatcttggactgatggtaaaagtgcaacagataaaacaggcacaataagctctgttaaacattttaaaggaaattattatctcgttcttgatgatgggaccgagatcagtcctgcgaatgtcatgtctgtgggacaatcatctaaataaaaacatctgggggaatatattatgttacgttcactttattctggaatcagcggtatgaagaactttcaaacaaagcttgacgtaatcggtaacaacattgccaacgtaaatacagtaggattcaaaaagagccgtgtgacctttaaagatatggtaagccaaaccattgccggcggttctgctgctggtgcaacaatcggcggaacaaactctaagcaaatcggtttaggttcatcatctggcacaattgatacaattcattcaacaagcgcgacacaaagcacaggaagaacacttgatttagcaattgacggcgacggttacttccgaattgatacaggtgacgggacagcttatacaagagcagggaacttctatttagataatactggaacactggttacaggtgatggctaccatgtactaaatatgaatggcggaacaattaaaattcctactgatgctcaaagctttagcattggttctgatggaaaggtgtcaattgttgatgctgaggggaaaacacaagacgggggacaaatcgggattgttacttttgccaacagtgacggcttagataaaatcgggagcaacctataccgtgaatctttaaactctggaacggccagtgcagcgaaccagcctggtgacggcggaactggtgctcttaaatcaggatttctcgaaatgtctaacgtcgatttaactgacgaatttactgaaatgatcgtagcccagcgcggattccaatcaaactcaaaaattattacaacatctgatgaaatccttcaagaactggttaaccttaaacgttaaggagggaggggaggcgagtaatcgcttctccgctgttttatgattaaagtaacccgtttgaacgggcagccctttacactgaatgcgctatttattgaacagattgaatgttttccggatactacaattactctgtcaaatggtaagaagtttgtagtaaaagaagatgaagaagctgttctggaaaagatcgcagctttctaccgaaaaatacaaatatttgcaatggatcaaggaatagaggaaccggaatgaagaaaaagttaatgatcatattactaattattcttatcgtaattggtgctctcggggcggcggcttattttgttttaggcggaaagtccgaaaaaagtgaagcgaaaaaaagtattgatgaaatcgttgcgtcttctgttgatgtagaagagatcacaacaaatttaaagtctgataacattatccgtcttgctattaaacttgaaactgattctgataaatcaaaagaagaacttgagaaacgtgatttccaagtgaaagacgctgttatatcactgctggctgatacgaatgctgatcagattgagggagacaagggaaaagaaacctttaagaaggaactaaaagataaaataaatagctacctccaagaaggaaaagtagaaaaagtgtatattacctcctttaatctgcaataaagcataatttgacagaatacggaggtgaggaaaatgtcaggagaagttctctcccaaaatgaaatagatgcactgctctctgcaatatcaactggtgaaatggacgctgaagagctgaaaaaagaagaaaaagagaagaaagtcaaggtttatgatttcaaacgtgcgctgcggttttctaaggatcagatccgcagtttaacgagaattcatgacaattttgcaagacttcttaccactcatttttctgctcagctcagaacctatattcacatatctgtcagttctgttgatcaggttccgtatgaggaatttatcagatcgattccaaacatgacgattctgaatctatttgatgttcatccgatggaaggaagaattatgatggaggtcaaccccacgatagcttatacgatgatggatcgagtcatgggcgggattggaatcagtcataacaaggttgacagtttgacagaaattgaaacaaaaatcatttctaatttatttgaaaatgcactgggtaattataaagaagcttggcagtcaattgctgatattgaaccggaaatgactgagtttgaagtgaatccgcaatttgttcagatggtatctcctaatgaaacagtcgtggtgatctcgctcaatactcaaattggtgaaatcagcggtgtcattaatctctgtatcccgcatattgtactcgagccgctcataccgaagctttcagtccactattggatgcaatcagaccgaaatgagccaaagcctgaggaaacaaagtcgcttgaaaaacgtatcatgacagcacaaatacctgtcgtggccgagctcggcacatctgaactgacgatagaagagtttttaagtttagaagtcggagactgcataactttggacaaatcagtcacggatcctcttactgtattggtcggagataagccgaaatttttaggacaagccggccgggtgaatcgaaaacaggcagtgcaaattttagatcacgacataagaggtgaacaagatggagaataatagattatctcaagatgagattgacgcgcttcttaacggtactggcagcacgcttgatgagccagagattccggaagtagatgacttatcggaaatggagcgtgatgcgatcggtgaaatcggtaatatttcattcggcagttctgcgacagcactgtcaacgcttttaaatcaaaaggtcgatattacgactccaagcgtaacggtcattccaagaagtaaaatcagcgatgcgtttcctgaaccgtatgtagcgattgaagtgaattatacggagggcttcagcggaagcaacctgttagtcgtggaacaaagtgacgcggcgatcattgcggacttaatgatcgggggagacggaaaaggtgcggacccttcactgggtgaaatccatttaagtgcggttcaagaagcaatgaaccaaatgatgggatcggctgccacatcaatgtctactgtattcagtaaaaaaattgatatttcacctcctcgggttgaattgctggatgttactgaagaaaagggtacagaccgtattcctgatgatgaaatgctggtgaaagtttctttcaacttaaaggtgggagaattaatagactccagcattatgcaactttacccattgacatttgcgaaagatttaatttcaagccttatgaactcagaaagtgcagaggaagaagaaacggtgcagcctgaagttacatacgaacagccgaaagagcctgtgacgccagagccgcgtattgaaccgaagcaacagcagcagccgccaaaaaggcagggaacagcaaaaaaagcagcgccagttcaggtttcaccggtggaattttccgcgtttgatccaaacgaagctgtacaagcccctattcataatctggatatgcttttggatatcccgctttcgattactgttgagcttggcagaacgaagagaagcgtaaaagagattttagagctttctgccggaagtattatcgagcttgataaattagccggtgagcctgtagatattttagttaatcagcgtatcgttgccaaaggcgaggtcgttgtcattgaagaaaacttcggagtaagagtcactgacattttaagccaggcagagcgcattaataatttaaaataacgaaacacaaggagagagatagattatggcacatagaattttaattgtagatgacgcagcatttatgcgaatgatgattaaagatattttagttaaaaatggttttgaagttgtggcggaagctgaaaatggagcacaagcggtagagaaatataaagagcattcacctgaccttgttactatggatatcacgatgccagaaatggatggtattacagcattaaaagaaattaaacaaattgatgcgcaggcaagaatcatcatgtgttctgctatgggacagcaatcaatggttattgatgccattcaggccggcgctaaggatttcattgtgaaacctttccaggctgaccgtgtgcttgaagcaatcaacaaaacattaagttaaagggtgtacgactgttgaaaaagagtcaatattttattgtttttatttgttttttcgttttattcagtgtacatccgattgctgctgccgcggcagactctgataattcaactgtaaacgaatggtttcaaaagaaagatgaaaaaactgcagatcaatcagagcaaaagaaagaaaaaacaacaaaaactgctgatgagacggagggagcggctgctccttctgtctcagcttttgattttgtaaagatgattttcgctttattgtttgttatcgcgctgatttacgggctggttaagctcatgaacaaaagaaatcggctcctaaagccttttcaatatgttgaaaatattggcggcacatcggtcggccagaacagatccatacaattgatcaaggtcggaaaaagtgtgctcatcgtcggtgtaggagagacgatccagctgctgaaagaaattgaggatgaaaaagagattgaagtcattctcagtcagcatgaagaggcaatgtcaagcaaaatagagtggcaaaagtttgtgaagccgcttaagagttctgaacatcagccgcagcaaaaactgccttcattttcaaaagcattaaaagagcaacttgaagagttaaaacaaaaccgttctgaaggaaagaagaaaggcccacgtcatcatgaatgagtttataaatattttcagttcaagcgatccggaaaacgtaagttcgactgttaaattactattattgttaactgtattttcagtggcgcctggaatattgattcttatgacttgttttactcgcatcgtcattgttctgtcatttgtcagaacttcacttgcgacgcaatctatgcccccaaaccaggttctaatcgggcttgcgctgtttttaacattttttattatggctcctactttttcagaaattaataaagaagcgctgaccccattaatggacaacaaaatcagcttggatgaagcgtatacgaaagctgaggaaccgattaaagaatttatgagtaaacacacaaggcagaaggatctggcgctgtttatgaattacgcgaaaatggataaacctgaatcattaaaggatattccgttaacaacaatggttccggcttttgccatatcggagcttaaaacagcatttcaaataggttttatgatttttatcccttttttaattatagatatggtagtggcgagcgtcttgatgtcaatgggaatgatgatgctgcctccagttatgatttctctgccctttaaaatattactttttgttttggtagacggctggtatttaattgtgaaatctttgcttcagagcttttagggtaggtgctaaacgtgagttcagaatttgtaatttctatggcggaaaaagccgtatacgtaacgctgatgatcagcgggccattattggctattgctttactggtcggtttaattgtcagcatatttcaggcgacaactcaaatccaggaacagactttggcgtttattccgaaaatcgtggcggttctcctggctctcattttttttggtccgtggatgctgtcgacgattctttcatttacaacagagctgttttctaatttaaatcgttttgcagggtaatgtagagatgaattcaattattgacttatttcctgcttttttattggtttttattagaatctctgctttttttgtaacgattccgctatttggacatcgaaatgtgccagctgttcatcgcataggttttgctttttttcttgcggtcatttgtttcagcaccattgataaaccgccctctttggagatagatgagcactatatgcttttggcgtttaaagaagctttggtcggcctatgtctgggtttaattgcttatatgatgattgccgcagtgcagattgccggctcgtttattgattttcaaatgggattttcaatagcaaacgttattgatccgcaaaccggtgcacaaagtccgttgattggccagtttatctatacgatggcacttttgtttatgctaagtgtcaatgcccaccatttgttgctggatggtatttactacagctttcagtatatttcagttgatcaggcatttccgaatttcggcgatgaaaagtttgcctattttattgcgaaaagctttaatgcaatgtttattatcgcttttcaaatgtcagcgccggttgtggccagtttgtttctagttgatttagcattaggtatcgtggctcgaactgttccgcagttaaatgtatttgtggtcggtctgcctttaaagatcgctgtcagtttcattatgctcattgtatgtatgtccgttatcttcgtcgttgtccggaatgttttcagtttaacgattgaaacgatgcggaatcttttagcattggtcggtgtttcttaatgaagcttagagttgacctgcagttttttgcgggagagaagacagaaaaagccactccgaaaaaacggaaggatacgcgaaaaaaagggcaggtagccaaaagctcggatgtcaataccgccgtttctttactggtaatattcctttcgcttattgcaattggtccgtatatgagagacaggctgctgtcattcatagaaacattttataccgaatcgctcacaatgaagctctcagaatcaaatgtgcatacattgtttgtcagcttattaaaggatatgggcatgatactcgcaccgatcttgctagttgctcttgttgcaggagtcgtaagcaactatatgcaggttgggttcttattttctgctgaagtgatacagcctaagcttgaaaaactggatccgatcaaaggctttaaacgaatatacagtatgagggcgattgtagagctgattaaatcaattttgaaaatcgtagtcgttggttttgcggcttttgctgtgctttggctgcattatggagaaattctccggcttcctctcctgacacccgaagaggcactttctttcgtttcaaaactcactttgtggatgggactaagcggtgcaggtgcattgttgattcttgctggtctcgactatttatatcagagatttgactatgagaaaaatatcaaaatgtcaaaacaagatataaaagatgagtacaaaaaatctgaaggagacccgattatcaagtctaaaattaaacaaagacagcgggaaatggcgatgaggcggatgatgcaggaagttccaaaagcagatgtcattatcacaaacccgactcactatgcgattgctttgaaatatgatgaagaaaaaatggacgcaccttatattgttgcaaaaggcgtcgaccaccttgcgttaaaaatcaggaaaattgctaaagagcatgatgtcatgatggtagaaaacagaccgcttgcccgtgcgttatatgatcaggtggaaattgaccaggcagtgccggaagaattttttaaagttttagcagaaattctggcttacgtatataaaacaaaacaaaaagtatattgaatttttcgatttaaaaggagagaaaaaacagcatgtcaacaagagatttatccgttttaataagtgttgtcctcattgtggcgatgctggtgattccatttcctccatggctgttaagtattttgatcattattaatatttctcttgcattgatcgtgcttctcaccacaatgaatatgcaggaagcgcttcagttttcgatttttccgtcactgttgctgcttttgaccctatttcgtttgggcttgaacgtctcaactacccgttcaattctttcacacggtgaaggaggtaaagtcgtcgagactttcggaaatttcgttgtcggcggaaatgtattagttggactcgttgtatttatcatccttattattattcagtttatcgtcattacaaaaggtgctgaacgtgtttccgaggttgcagcaaggtttacgctggacgcaatgcctgggaagcagatgagtattgatgctgatttaaacgcagggatgattaccgaacaggaagcgaagcatcgccgcgaaaaagtggcaagagaagcagacttttatggagcaatggacggtgccagtaaatttgtaaaaggtgacgccattgccggaatcatcattgtgatgatcaatattattttcggaatcgtgatcgggatgcttcagcagggcatgtccattcaagaggctgcttcacactttacgatgctgactgtaggggatggaattgtttcgcaaatcccggcactgttaatttctacggctacgggtattgtggtcacaagagctgcctctgaaggaaacttagggcatgacattacaggccagctgtttgcgtatccaaagcttttatacgtcgcagcagctacgatcatgcttttaggtattttcactccgatcggcatccttctgacggggccgcttgcgggattgcttgcttttggcgcatatacactatctaaatcaggtaaggaaaaagaagaagtggatgagattcttgaggaagaggctgaggtggacgagcttaaaagccctgaaagtgttgttcagcttctgcatatagatccgatagaatttgagtttggatatggcctgataccgcttgctgatgccaatcaaggcggtgatttattagaccgaattgttatgatacgccgtcagttggctttggaactcgggcttgtcattcctgtcgtgcgaatcagagataatatagcgttgcagcctaatgaataccgattgaaaattaaaggaaacgaagtagcaaaaggcgagttgttgcttgatcattatttagcgatgtcgcctactcctgaggacgatctcattgaagggattgaaacagtggagccttcattcgggctgccggctaaatggattagcgaagcggtaaaggatgaagccgacatgcttggttatacagtagttgatcctgcatcagtcgtttcaacgcatattacggagaaaattaagcagcatgcccacgaattgatcggaaggcaggagacaaaacagctgatcgatcacttgaaagaatcgtatccagtcctggttgaagaggttacgccgaatccattgtctgtcggtgatattcagaaagtgcttgctaagcttttaaaagaaaaagtttcaattcgaaacttagtaacgatttttgaaacacttgctgactatgggaaattaacaacagattctgatcttttgacagagtatacaagacaagcgcttgctaaacaaattacagcccagtttgccaaagaaaatgaagtgttgaaggttgttacttgttccggccgtgtagaaaaagcaatagcagacggtgtgcagcagacggaacacgggaactatttatcacttgaaccagatatttcagaaagtatagtgcgctctgtcgccaaagaagctgaacagctctcattacgtcaggaaaccgcgattcttctttgctcgccgcctgtcagaatgtatgtgaagcagcttctggaacggtacttccctgatcttccggtactctcttataacgaacttgaggcgaatgttgaggtacaaagcattggagtggtggatatttaatgaaaataaaaaaatttactgctgcttcaatgcaagaagcggcacttctcatcagaaaagagttaggtaatgaagcggtcatattaaattcgaaaaaaattaaaaagcgaaaatggtttggcctcgtcaacaagcctgctgttgaagtaatcgccgtattggatcaggactttcttgagaaaaaaacgcctcagaaggcagctgaaccgaaacaaacattaaaaactccggtcagcagtccaaaaatagaggagagaacatatccccctcaaattccggcgcaacaggagctaggtgatttttcagcatatcaatctgtacttcctgagccgctgcgaaaagcagaaaagcttttgcaagaaacagggatcaaagagtctacgaaaacgaacactctgaaaaaattgcttcgcttctctgttgaagcaggcggcttgactgaagaaaatgttgtcggcaaacttcaggaaatactatgcgatatgctgccctcagcagacaagtggcaggagccaattcattcaaaatatatcgttctctttggttcaacaggggctggtaaaacaactacactggctaaactcgcagccatatctatgcttgaaaaacataaaaaaatcgcttttattacaacagatacgtatcgtattgcagctgttgaacagttgaaaacatacgctgaactgctgcaggctcctctggaagtttgctatacaaaagaagaatttcagcaggcgaaggagctattttctgagtatgatcatgtgtttgttgatacagctggaagaaacttcaaagacccgcaatacattgatgaactgaaagaaacgattccttttgagagcagcattcagtcatttcttgttttatccgcgactgcaaaatatgaagatatgaagcatattgtcaaacggttttcatccgtccctgtcaatcagtatatttttacgaaaatagatgaaacgacttccttaggttctgtatttaatatactggcagaatcaaaaataggtgtcgggtttatgactaacggccagaatgtgcctgaggatatacagactgtatctccacttggttttgtgaggatgctgtgcagatgaacagatatgaccaagcagcaactttacgggcgaaaatggaaaaacgtgagcgcgttctgccaatggtttattcacaaaaagcgaagacacttgctgtcatcagcggcaagggcggtgtcggaaaatccaatattaccttaaatatggcacttgcgctgcaggataaaggtaagaaggtgctgctcatcgaccttgatatcgggatggggaacattgatatattaataggaaattcatcgtctgccacgataatcgatgttttaaccgatcgtcagcctttgctgcagtcattatccgttggcccaaagggtttgcggtatatatcagggggaaccggtcttgatgtgatgtttcagctcgatcagagaaaatggacgttttttgccaatgaactttctcatgcattaagccagttcgattatgtgctgtttgacatgggagcaggcttatcaaaagatcaactgccttttattttatcagcagaagatattttgattattacaactcccgagccgacggccattatggacgcatacagcgctgtcaagcacttggttttgacagaaaataagctttcaatgaaggtggctgtcaatcggtgccgtgaccaaaaggaagggcttgacgcttttgcccgcctctcccgtacaattcatatgtttttggatgttcaggttcagtttgccggttccgtttctgacgatgtgatcgtgagcaaagcggttgtcgaacaggttccttttttcataaaaagccctcaggcaaaagccagccggtcagtccgtattttagcggacgccttgtttgaaagagaagaaacgagacacaaagaagacaaacagacatttattgagaaattatcttcttttttaatgaggagggcttaatttgattcgtgtgcttgtagttgatgattcagcttttatgagaaaaatgataagtgattttctgaccgaagaaaagcagatagaagtaatcggaactgcgagaaacggagaagaagcgcttaagaagattgaattattaaaaccggatgttattactcttgatgttgaaatgccggtcatgaatgggacagatacgctccgcaaaattattgagatttataacttgccggtcattatggtgtctagccagaccgagaaaggtaaagaatgcacaattaattgtttggagatcggtgcctttgactttatcacaaagccatcaggctcaatatctctggatctatacaaaattaaagaacaactagttgagcgtgtcgtcgcggcaggactttccggcaagcggaaacgtcctgtttcccagacagttcggcccgaacctattgtgcgtgctgtcgttaagcctgaattaagcaaaccgaaacctggcacgggcagacaaattgtgtgtatcggcacatcaacaggcggtccacgggcgttacaaaaggtgataccgaagctccctaaggatttgaacgcaccagtggttgtcgttcagcacatgcctgaagggtttactgcttctttggctgatcggctgaatcatttatctgacattcaggtaaaagaagcaaaagatggtgaagcagctcttaacggctgtgtttacatagcaccgggcggaaaaaacatatccgttattaaaaacagcgaaggactccaggttgtgcttgataaccatgacacaccaagccgtcataaaccatctgctgattatttattccgttctgtcgggaaactgacagattatgaaaaagtagcggttatcatgaccggaatgggcagtgacggcactgctggactaaaggacatgctaacagccggcaatgtgaaagccattgcggagtctgaagaatcttgtgtcgtatacgggatgccaaaagctgctgttaaagcgggtctcattcatgagattaaacatgtggaagatatcgcagcatccatcacaagctgtgtgaaaaaagagagggtgtgattcaaatggatatgaatcagtatttagatgtctttattgatgagagtaaagaacatttacaaacatgtaatgaaaagcttcttcttttagagaaagacccgactgatcttcagctcgtacatgatatattcagggctgcccatacattaaaaggaatgagcgcaacgatgggctacacggatttagcacatcttacccatctgcttgaaaacgtgctggatgcaatccgaaacggagacatggaagtcacctcagactggctggatattttgtttgaagctctggatcacctggaagcaatggttcagtctattattgatggcggggatggtaaaagagatatctcagaagtgagtgccaagcttgatgtgaatggtgcgcacgctgaatccgctgcctccgctgaacctgcagaagcacagagttcagcatctgattgggaatatgatgaatttgaacgcacagttatacaagaagcggaggagcaaggcttcaaacgatatgaaatcaagatttctctgaacgaaaactgtatgttaaaagcagttcgtgtctatatggtgtttgaaaaactaaatgaagtcggagaagtagccaaaacaattccaagtgctgaagtgcttgaaacagaagattttggaactgactttcaagtttgtttcttaacacatcaatcagcggaagacattgaacaattaatcaatggcgtgtcggaaattgagcatgttgaagtcattcaaggggctcctttaacatcagctgaaaagcctgaagaatctaagcaagaagattcaccagcagcagctgtacctgcgaagcaggagaaacaaaaacagcctgctaaaaacgatgaacaggcgaagcattcagccggcggatctaaaacaattcgtgtcaacattgacaggcttgattctttaatgaacttatttgaagagcttgtcattgaccgcgggcgtctcgagcagattgcgaaagagcttgagcataatgaactgactgaaacggttgaacgaatgacgagaatttccggagatttgcaatcgattattctgaatatgagaatggtcccggttgaaactgtttttaacagattcccgagaatgattcgccagcttcagaaagagctgaataaaaaaattgaactctcgatcatcggtgcggaaactgaactggatcgtacagtaattgatgaaatcggagatccactcgttcacttgatcagaaacagtattgaccatggtatcgaggcgccggaaacacgtttgcaaaagggaaaaccggaatcaggaaaagttgtgcttaaagcttatcacagcggcaaccatgtctttatcgaagtagaggatgacggcgcaggccttaatcgaaaaaaaattctggaaaaagcgcttgagcgcggggtcataacggaaaaagaagctgaaaccttagaagacaaccaaatttacgaattgatttttgctccggggttctcaactgctgaccaaatttctgatatttccggccgcggtgtaggacttgacgttgtaaaaaacaaactggagtctcttggcggttcagtcagtgtgaaatcagccgagggtcaaggctctctattcagcatccagctgccgcttaccttgtctattatttcagttctgctgattaagttggaagaagagacatttgccattccgatttcttcaatcattgagacagcagttattgacagaaaagacattttgcaaacgcatgaccgtgaagtgattgactttagagggcatattgtccctgtcgtttatttaaaagaagagtttaaaatagaagatacaagaaaagatgcggaacagctccatatcattgtcgtgaaaaaaggcgacaaacctactgcatttgtggtggactcctttattggccagcaggaagttgtgctgaaatcactcggagattatttaacaaacgtctttgcaatttccggagctactattttaggagacggagaagtagcgctcattattgattgtaatgcactgattatttaaccattcgaggaggtgtctcacatgactgcagaaattaaaacaggcgaaaaaatgatagtctttatggtaaatggcaaagaatatgccatttccgtcactcaggtgaaatcaattgaaaaatggcaaaagccaacgagggtacctggcgtcgaaccatatatttgcggggtaatcaatttacgcggggtggtgactccggttattgatttaagaaaacgcctgaatttgccagagtatgaaattacagatgaaacacgaattatcattattgcttatcgtgatattgaagtcggctggattgtggatgaagcgaatgatgtgattaccgtacacgaaagtgaaatagaatctgctccagaaggcgttcagaaagatacggatgtgtcgatcgaacagattgtgaaacaagagaacagactcttaaatattattgatgcgaacgcggttttggataaagaatcatctcagtccgctgtgcccgatcaagcttaatcttaaaggggttatgacatgagtatttttaatggaatcaaagaagagcagatggacattttgcgggaagtcggcaatataggcgccggccactccgcctctgcaatggcccagctgttaaatagaaagatagatatggaagtcccatttgcaaagctgctgtcttttgatgagcttgttgattttttcggcggcgccgatgtcccggttgccagcatctttttaagaatggaaggcgatttaacgggttcaatgttctttataatgcctttttttcaggcggagcagtttatcagagagctgattggaaaccccgattttgacatagaggacttaggtgaagaccacatgagctcatccgctttgcatgaactgggcaatattttagcggggtcatatttaacagctttggcggatttgacgaaactccagctctatccaagtgttcctgaagtctctttggacatgttcggagcagtgatcagcgaagggctgatggagctcagtcaggttggagaacacgccattgttgtcgacacgtcaatttttgaccaaagccatcagcaggagctgaaagcgcatatgtttatgctgccggactatgattcatttgaaaagctctttgtcgccttaggtgcatcattatgagtacaactgaggctgttgttataaaggttgggattgctgacgtgaagatcgcccgcttcccggataccatccggacctctggtttgggctcatgtgtggggctggtgctttatgataaagaaaagcaaacggcgggtcttgttcatgtcatgcttccggattcgacgttatcgaaaactgccgagctcaaccgggctaagtacgctgacaccgccgtacagaccacgattgatatgctgatagaagcgggatgccggaaatttgcattaaaagcaaagctggccggcggatcagagatgtttaaatttaaatcgacaaatgatttgatgaagatcggaccgagaaatgtattagcgataaaagaacagctgtctttatttaatattcctattattagtgaagatacgggcggctcaagcggccggacgatagaatttgaaccgaagtcctgcatgctgcatattcgaactgttaaacaaggtgaaaaaacgatttaattaaggtattagggggataacaatgcaatccttgaattatgaagatcaggtgctttggacgcgctggaaagagtggaaagatcctaaagccggtgacgacttaatgcgccgttacatgccgcttgtcacatatcatgtaggcagaatttctgtcggactgccgaaatcagtgcataaagacgatcttatgagccttggtatgcttggtttatatgatgcccttgaaaaatttgaccccagccgggacttaaaatttgatacctacgcctcgtttagaattcgcggcgcaatcatagacgggcttcgtaaagaagattggctgcccagaacctcgcgcgaaaaaacaaaaaaggttgaagcagcaattgaaaagcttgaacagcggtatcttcggaatgtatcgcccgcggaaattgcagaggaactcggaatgacggtacaggatgtcgtgtcaacaatgaatgaaggtttttttgcaaatctgctgtcaattgatgaaaagctccatgatcaagatgatggggaaaacattcaagtcatgatcagagatgacaaaaatgttccgcctgaagaaaagattatgaaggatgaactgattgcacagcttgcggaaaaaattcacgaactctctgaaaaagaacagctggttgtgagtttgttctacaaagaggagttgacactgacagaaatcggacaagtattaaatctttctacgtcccgcatatctcagatccattcaaaggcattatttaaattaaagaatctgctggaaaaagtgatacaataatgaatttcatggttagcgagtgaaaaacatgtcaacactattatggcttttaagctttacgctccacggcgttcttctgtacgctgtcattatcctgtatacgaggctcgctgcagtgaaagaaacagaaaaacagcaaaaacagatacttgaagagacggaaaacaccttggcggcatttctgcttgaattaaaagaagaaaatgagaaactgatagaaaataaagcttcatctgcaagtcaatacgatgaagaatcccaaaagccaggccttcagccctctgaaacatatcaagagcgggatccagtccaagaggcagagaatcttcctgaacatattgaaggtctgattacagaggttgaccgtcgggaagagatcgtaaacagtgaggtccaatcatttgaagaccaggtcatagaattatatgaacagggatattcggcaagtcaaattgcccagaaaatgaagagcggaaagacagaaatcgagctatttttaaaatttcgctccaaaggtgtaaaggattcttgattgtcggataaagctgtgttatattatgtcttggtgttaaatacacacgcttaacgatttatgcagagggtgctgcaggcggcagttctgcacaaaaatgacctaagcggaggaaaaaaaccattatattaggaggaaataacatgtcagtcatttctatgaagcaattgcttgaagctggtgttcacttcggtcaccaaacacgccgttggaacccaaaaatgaagcgttacattttcacggagcgtaacggaatctacatcattgaccttcaaaaaacagtcaaaaaagtagaggaagcttacaacttcactaaaaatcttgctgctgaaggcggaaaaatccttttcgtcggaacaaaaaaacaagctcaagattctgttaaagaagaagctcaacgctctggcatgtactatgtcaaccaacgctggttgggcggtacattaacaaactttgaaacaatccaaaaacgtattaaacgtcttaaagacattgaaaaaatgcaagaaaacggtacgtttgatgtacttcctaaaaaagaagtcgttcaattgaaaaaagaattagagcgtcttgaaaaattcctaggcggaattaaagatatgaaggatcttcctgatgcattattcatcatcgatcctcgcaaagagcgcatcgctgttgcggaagctcgcaaattaaacatccctatcatcggtatcgtagatactaactgtgatccagatgaaatcgatgttgttatcccagcgaacgatgacgctatccgcgctgttaaacttctaacttctaaaatggcagatgcaatcttagaagcgaagcaaggcgaagaagaagcggaagttgctgaagaaactgcaccagaaacagaaacaacaactgcgtaacctattcaaaaggtgataagagggactgccttttatcaccttttttcaagaaaaatgtgtaatatacatactcttgtttaaacatataaggaggaatacaaatggcaattactgcacagcaagtaaaagaactgcgtgaaaaaactggcgcgggcatgatggattgtaaaaaagcgttaactgaaactgacggagatatggacaaagcaattgaccttttaagagaaaaaggaattgcaaaagcagcgaaaaaagctgaccgtatcgcagcagaaggttctactcttattaaaactgacggcaacaaaggcgttatcctagaagtaaactctgaaactgatttcgttgcgaaaaacgaaggttttaaagagcttcttaacactttagctgaccaccttcttgcaaacacgccagctgatgttgaagaagcaatgggccaaaaaatggaaaatggctcaactgttgaagagtacatcacaagcgcagttgctaaaatcggtgagaaaatcactcttcgccgctttacagttcttacaaaagacgacagctctgcattcggtgcgtaccttcacatgggcggccgcatcggtgtattaactgttctcaacggtacaactgatgaagaaactgcgaaagatatcgcaatgcacgttgctgcagttaaccctcgttacatttctcgtgatcaagtatctgaagaagaaacaaatcatgagcgtcaaatcttaactcagcaagccctccaagaaggcaaacctgaaaacatcgtagcgaaaatggttgaaggccgtctgaacaaattcttcgaagaaatttgtctattagaccaagcgttcgttaaaaacccagatgaaaaagtgaaacaagttattgcagcgaaaaacgctactgttcaaacttttgtccgctatgaagttggagaaggcatcgaaaaacgtcaagaaaactttgctgaagaagtaatgaaccaagtgaaaaaataatggtgaaaagatttcgcggctaagtcgcgtcttttcaggcagtataggggacacattttgtgttccctatttttaaaactatatttacaaacctttttttctcttgcataatagaaaacggcaatgtttacacttggaggttatcatggaaaaaccaaaatacaaacgtatcgtattaaagcttagcggggaagcattggcaggagaacagggaaatggaattaacccgactgtcattcaatccattgcaaagcaagtgaaggaaatcgctgagcttgaagtcgaagtggctgttgttgtaggcggcggcaacttatggcgcggaaaaacaggaagtgacctgggcatggaccgcgcgactgctgactatatgggaatgctggcgacagtaatgaattcgcttgctcttcaagacagcttggaaacactcggaatccagtccagagtgcaaacatccattgaaatgagacaagttgctgaaccgtacataagaagaaaagcgatacgccacttagagaaaaaacgtgtcgttattttcgctgcgggcacaggaaacccatatttctcaactgatacgacagctgcactgcgggctgctgaaattgaggcagacgttattttaatggctaaaaataacgttgacggtgtgtataatgctgatcctagaaaagatgaatcagctgttaagtatgaatcactttcttatcttgacgttcttaaagacggcctggaagtcatggattcaacagcttcctctttatgcatggacaatgacattccgcttatcgtcttttctattatggaagaaggaaatatcaaacgtgccgttatcggtgaatcaatcggaacgatcgtgagggggaaataacgtgtcaaaagaagtattaactcaaacaaaagaaaaaatggaaaaagcaattgctgcttatcagcgcgaattggctactgtacgcgcaggccgtgcaaatccatcattattagataaagtaacggttgaatattacggagcgcagacacctttaaatcagttgtcttctattaacgtgcctgaagctcgtatgctcgttatcacaccatacgataaaacagcaatcggcgatatcgaaaaagcgattttaaaagctgatttaggtcttacaccaacaagtgacggcaatatgattcgaattgcaattccggcactaacagaagagagacggaaagaattagtgaaagttgtaaaaaaatatgctgaagaagcaaaagtagctgttcgtaacgttcgccgtgatgctaacgatgatctcaaaaaacttgagaaaaacggagacattactgaggatgaactgcgtgcttccactgaagacgttcaaaaactgacagatgaatatgtgtcaaaaattgacagtgtcacaaaagacaaagaaaaagaaatcatggaagtttaatgaaaaactatgtacaatagataatagtgaaaagaccctctcatgtttacagggggtttttttgttaatactgttgattacattgattatcagcagggaatgtaacctttttgggtgacggaggaatctcatgctcaacatactcaaaaattggaagaatcagcaaactgcggcttccaacttagaacgttatacaaaagaagacatacttaagggagaaattcccgaacacatcgccattatcatggatggaaatggccgttgggctaaaaaacgctctcttcccagaattgcaggccaccatgaagggatgaaggtggtaaaaaggaccacgaagctcgcaaacgaattaggtgtcaaagtactgacattgtatgcattttcaacagaaaactggaaaagaccgaaaatggaggtcgattttttaatgaagcttccggaagaatttttgaatacgtatcttccagagcttgttgaggaaaatgtacaggttcggatcattggggatgaaacggctttgccggcgcacacattacgtgcgattgaaaaagctgtacaggacacggcgcaaaacgacggaatgatccttaattttgctcttaactatggaggccgtactgaaattgtcagtgctgcaaaatcactcgcggaaaaagtgaaggaaggctctttgaatattgaagacattgatgaatcgcttttttctacttatttgatgactgaatctttgcaggatcctgaacttttaattcgaacgagcggcgagataaggctgagtaattttatgctatggcaggttgcctacagtgaatttgtctttactgacgtcttgtggcctgactttaaagaagatcacttcttgcaggcgttaggagagtttcagcagagaggccggaggtttggcggaatttagaggatggtggacatgaaacaaagaattttgacaggtgttctggcagcaattgtatttttatttttggttattgtcgggaaattgccgttcaccatattaatttatgctatgagcagtgtggcgctttttgaacttttacggatgaaaaagctgaagctggtttcactgcctggtttgatcggtcttttattattgtggatgttcttattgccaagccagtattcgttttttgaagcggacgggatttccaaaatggaaatagctttatttgcggtactgctattgctgacttacacagtgttggtcaagaacacctttacttttgatgaagtcgggtttattacgcttgcagcaatttacatcggaatgtgttttcattattttatcgaaatcagaaatcttgaccaatacggattaacatacattttttatgcgtgtgttgtcatttggtccaccgattccggtgcctattttgtcggtaaatcgcttgggaagcggaaactgtggcctgaaatcagtccgaataaaacagtggaagggtttgcaggcggaattgtcatcgcacttgtattggcgacgatttttcagcttgttgcacaacttccgatcccgtatatctatctgctgttgatcacgctgtttttgtctgtttttggacaactgggagatttagtggaatccgccttgaaaagacattacgatgtaaaggattctgggaatattcttcccgggcatggcggtatattagaccgttttgacagtttcttgtttgtcatgcctttcttgtactttctgcttgcccttttttcataaaaaagtctaatatgaatatgagactgatcatgcagcaataagaataggagtagtggcaactttgaaaaatatttgtcttttaggagcaacaggatcaatcggcgaacagactcttgatgtactgcgtgcacatcaagaccaatttcagctggtatctatgtcgtttggcagaaatattgataaggccgttccaatgattgaggtctttcagccgaagtttgtctctgtcggtgatctggatacatatcataaattaaaacaaatgtctttttcttttgaatgccaaatcgggctgggagaagaaggactgatagaagcagcagtgatggaggaggttgacattgttgtcaacgctttgcttggaagcgtcggtcttatcccgacattaaaggcaattgaacagaaaaaaacaattgcgcttgcaaataaggaaactcttgtcactgcagggcatatagtaaaagaacatgctaagaaatatgatgttccgctgctgcctgttgacagtgagcattcagccatttttcaagctcttcaaggcgaacaggctaaaaacattgaacgcctcatcattacggcatccggcggaagttttcgggacaagacgcgggaggagctcgaatcagtaacagttgaagatgcattaaaacatccaaactggtcaatgggtgcaaaaattacaattgattcggctacaatgatgaataagggattagaggtgatcgaggcacactggcttttcgatataccttatgaacaaattgatgtggttttacataaggagagcatcatccattcaatggttgagttccatgataaaagtgtgatcgcacagctcggaactccggatatgagagtccccattcaatatgcgctcacttatcctgaccgattgccattaccagatgcgaaaaggcttgaattatgggaaatcggcagccttcattttgagaaagctgattttgacaggttccgatgcttacaatttgcttttgaatcaggtaaaataggaggaacaatgccgacagtgctaaatgcggcaaacgaagtagctgtcgctgcctttttagctggcaagataccgtttttggctattgaagactgtatcgaaaaggcactaacccgccatcaattactgaaaaaaccgagcctggcggacattcaagaagtggacaaagatacccggggatacgtcaattcaatactcacataaggtggtatgttcgtgaatacagttatagcgtttatcattattttcggaacgctcgttttcttccatgaactgggccatttattgctagcccaaagagcgggaattctctgccgtgaatttgcgatcggcttcggtccaaagattttttctttcaaaaaaaatgaaacagtttatacgatcaggctgcttccggtcggcggatttgttcgtatggccggcgaagatccggaaatgattgaggtgaaacccggatacacggtcgggcttctgtttaataaagaagatcaagttgagaaagtcatcatcaatcaaaaggaaaaatatccggatgctttagtcattgaagtggaaacagcggatctagagcatgacatgaagatcactggttatgaacaggggaaagaggacgaactttccagctttactgtcagcgaaacatccttttttattgtagacggagaagaagtgcagattgcgccgtataatcgccaatttggttccaaacctgtatggcagcggattaaagcaattgctgcagggccgattatgaactttattttagcttacgtcattttagtgatgcttgggctgattcaaggcgtaccgtcaaatgaacctatgctcgggcagctgacagacaatggacgggcggctgaagcagggctaaaagaaggggattatatccaaagcattaacggagagaaaatgaggtcttggactgacattgtctccgctgtaaaagaaaacccggagaaagaaatggacgttgcagtaaaaagagataacaaaacgcttcatatttcggtgactccggaagctgttaaagatgagaacaaaaaaacaatcggacgtttcggttcctatgcgccgactgaaaaaggcgtactctcagcggttgcttacggcgcgacatcaacagttgatgtcaccaaagccattttaaccaatctgagcaaattagtaacaggccaatttaaactcgatatgctgtcaggtcctgtcggcatatatgacatgacagaccaagtggcgaaaacagggatcgtgaacttatttcagtttgcggcgtttttaagcattaaccttgggattgtcaacctgcttccgattccggcacttgacggaggaagactgttgtttctatttattgaagcgattcggggcaaaccgattaacagggaaaaagaagcatttgttgtgtttatcggagtagctttcttaatgcttcttatgctggttgtcacatggaacgatatccagcggctgtttttgtaaacgaaaagtaaatcaatcagaggtgcgaagaaatgagacaaagcttgacgcttattcctacgctccgtgaagttccagctgatgccgaagcaaaaagtcatcagcttcttctgagagcaggatttatcagacagaatacgagcggggtatacagctatatgcctcttgcgtataaggtgattcaaaacattcagcagattgttcgagaggaaatggagaaaattgatgccgtagaaatgctcatgcccgcattgcagcaggcagagacatggcaggaatcaggcagatggtatacgtatggtcccgaactgatgagactaaaagaccgtcatggccgtgaatttgctttaggggcaacgcatgaagaggttatcacttcgcttgttcgcgatgaggttaaatcttataagcgtctccctctgactctttatcaaattcagtctaagttcagagatgaaaaacgtcctcgcttcggtttgttaagaggccgcgaatttattatgaaggatgcgtactctttccatgcatctgcagagagcctggatgaaacgtatcaaaaaatgtacgaggcctattctaatatttttgcccgctgcggcattaatgtaagacctgttatcgctgattcaggcgcaatgggaggaaaggatacgcacgaatttatggcactttctgcgatcggagaggatacgattgcgtattctgatgaatcacagtacgcggctaatatcgagatggctgaagttcttcaccaggaagttccttcagatgaagagcctaaagctctagagaaggttcatacgcctaacgtgaaaacaatcgaagaactgactgcgttcttacaggtttcggctgaagcgtgcattaagtcagtattgtttaaagctgatgaccgttttgtcttagtgcttgtaagaggggatcatgaagttaacgatattaaagtgaaaaacttgcttcatgcagaagttgtagagcttgctacacatgaagaggtcattcagcagctcggaacagagccaggctttgtaggccctgtcggtattcatcaggatgtggaagtatatgccgatcaagctgtgaaagcaatggttaatgctgttgccggggcaaatgaaggagatcatcattataaaaatgtcaatgtgaatcgtgacgcgcaaattaaagaatttgctgatcttcgttttattaaagaaggtgatccttcaccagacggcaagggaacgatccgttttgctgagggaatcgaagtcggacaagtctttaagctcggaacacgctattcagaagcgatgaatgcgacatatttagatgaaaacggacgcgcgcagccaatgctgatgggctgttacggaatcggtgtgtcaagaacgctttctgctattgctgaacagcatcacgacgaaaaaggcttaatatggccaaaaagcgttgcgccgtacgatcttcatattcttgctttgaacatgaaaaacgatgggcaaagagagcttgctgaaaagctgtatgccgatttaaaagcggaaggctatgaagtgctctatgatgaccgtgctgagcgtgccggcgtaaaattcgctgattcagatttaatcggccttccaatccgcatcactgtcggaaaacgagctgacgaaggaatcgtcgaagtgaaaattcgtcaaactggtgagtcaactgagatttcagtagacgaattatctgcgtttatcagcaagcagtaatcaccataacgatttatcaaaaaacatgttaaaatagaaataatagaaggtacctcattgcctgaggtaccttcacttatgatgtttttagggagggatactgtcttaatggaacagttatcagtaaacagaaggcagtttcaaattcttctgcagcagattaatatgacagatgataccttcatgacatactttgaacatggcgagattaaaaagctgacaattcacaaagcttctaagtcttggcattttcattttcaatttaaatctttgctgccttttcaaatatatgacacattaacaacgaggctgacgcaatcgtttgcccacatagcaaaagtgacatcttcaattgaagttcaggatgccgaggtcagtgaaagtatcgttcaagactactggtcacgctgcattgaagaactgcagggcatttcgccgccgattatcagtcttttaaaccagcaaaaaccgaagctgaagggcaataaactgattgtcaaaaccaaaacggatacagaagcggctgcgctaaaaaacaaatacagttccatgattcaagcaggctaccgtcaatttggctttccggatcttcagcttgatgctgaaatatttgtatccgagcaggaagttcaaaagtttcgggaacaaaagcttgcggaagaccaagagcgggcgatgcaggccttgattgaaatggagaagaaagataaagaaagtgatgaagaccaagcaccatctggtcctcttgttatcggttatcaaattaaagataacgaggaaatccggacacttgacagcatcatggacgaagaacggagaattacggtccaaggttatgtgtttgatgtggagacgcgcgagctgaagagcgggcgcacgctgtgtatcttcaaaattacagactatacaaatagtattttgatcaaaatgtttgcacgtgaaaaagaagatgcggcactgatgaagtctctgaaaaaaggaatgtgggtaaaagcacgcggaagcattcaaaatgatacatttgtcagagaccttgtcatgatcgcaaatgacgtaaacgaaataaaagcaaaaacccgtgaagattcagcacctgaaggagaaaaaagagtggaattgcatcttcattccccaatgagccaaatggatgctgttacgggtatcggaaagcttgtcgaacaggcgaaaaaatgggggcatgaggccatcgctttgactgaccatgctgtcgttcaatcctttcctgatgcgtattctgcggcaaaaaagcatggaattaaaatgatttacgggatggaagcgaatctcgtggatgatggcgtgccaattgcttataatgccgcacatcgtctgctcgaagaagaaacatatgttgtttttgacgttgagacgacaggattgtctgctgtatacgataccattattgagctggctgcagtaaaagtaaaaggcggagaaattattgataaatttgaggcgtttgcgaacccgcatcgtccgctttccgccacaatcatagagctgacagggatcactgatgatatgctacaagacgctccggatgtcgtagatgtaataagagatttcagagaatggattggcgatgatatccttgtcgctcataatgcaagctttgatatgggattcttaaatgtagcctataaaaagcttcttgaagtcgataaagctaaaaacccagtcattgatacgcttgaacttggacgttttctctatccggaatttaagaaccaccggttgaacacactttgtaaaaagtttgatatcgaactcacacagcatcaccgtgcgatctatgatactgaggcaaccgcttatttgcttctgaaaatgctgaaagacgcagctgaaaaaggcattcagtaccatgatgagttgaatgaaaatatgggtcagtccaatgcttatcaaagatcaagaccgtatcatgcaacattacttgccgtgaacagcacgggacttaaaaatttatttaagcttgtgtcactttctcatattcattatttttacagagtgccgcgtattccgagatctcagcttgagaaatacagggaagggctgctgatcggttctgcctgtgacaggggagaggtttttgagggaatgatgcaaaaatcgcctgaagaggtggaagatatcgcgtcattctatgattaccttgaggttcagccgcctgaagtgtatcgtcacttgctggagcttgaactggtccgtgatgaaaaagcgctgaaagaaattattgcgaatatcacgaagctgggggaaaagcttaataaaccggttgttgctacgggaaatgttcattacttgaatgatgaggataaaatctacagaaagattttaatatcctcacaaggcggggcaaatccgctgaataggcatgaactgccgaaagtgcatttcagaacgacagacgaaatgcttgaagctttttctttcttaggtgaagaaaaagcgaaggagatcgtagtcaccaatacccaaaaggttgcttctttagttgatgacatcaagccgattaaagatgatttatatacgccgaaaatcgaaggcgccgatgaagagatcagagaaatgagctatcagcgtgcaagaagcatttacggggaagagctgcctgaaattgtcgaagcgcggattgaaaaagagttaaagagtattattggccacggatttgctgttatttacttgatctctcacaaacttgtaaaacgttcactagatgacgggtatctcgttggttcccgtggttccgtaggatcttcattagttgcgacacttactgagattactgaggtaaacccgctgccgccgcactatgtttgtcctgagtgtcagcattctgagttctttaatgacggttctgtcggttctggttttgacctgcctgacaagacatgtcctcattgcggaacgcctttgaaaaaagacggccatgatattccatttgaaacgttcttaggatttaaaggggacaaagtacctgatatcgatttgaacttctcaggggaatatcagccgcaagcacacaattacacaaaagtattgttcggagaagacaatgtatatcgtgcgggaacaataggcacggtggcagaaaaaacagcctacggttatgtaaaaggctatgccggagacaacaatcttcatatgcgcggtgccgaaatagatcggctcgtacagggatgcacaggtgtaaaacgtacaactggacaacaccctggcggtattatcgtagttccggattatatggatatttatgatttttcaccgatccagttcccggcagatgccacaggttcagagtggaaaacgactcattttgatttccactccatccatgacaacctgttaaaacttgatattctcggacacgatgacccgactgttattcggatgcttcaagacttaagcggaatagatccgaaaacaattccgacggatgatcctgaagtgatgaagatcttccagggaaccgaatcactcggtgtgactgaagaacagattggctgtaaaacgggcactcttggaattcctgaattcggaacccgatttgtccggcagatgcttgaagatacaaagccgaccactttttctgagctcgttcagatttcaggcttgtctcacggaactgatgtatggcttggcaatgcacaggagctcatccacaataatatttgtgagctgagtgaggttatcggctgccgtgatgacattatggtttatttaatctatcaaggccttgaaccgtcccttgcctttaaaatcatggaattcgtgcgtaaaggaaaaggattaacgcctgaatgggaagaagaaatgaaaaataacaatgtcccagactggtatattgattcctgtaaaaagattaaatacatgttcccgaaagcccacgccgcggcatatgtcttaatggcagtccgcattgcttactttaaagtgcatcatgctcttttgtattatgcggcttattttaccgttcgtgcagatgactttgatatcgatacaatgatcaagggctctacagcaatcagagcggtaatggaggatataaactctaaaggacttgatgcttcaccgaaggaaaagaaccttctgactgttttagaattagcgcttgagatgtgtgagagaggctattcattccaaaaagtcgatttatatcgctccagcgccacagagtttattattgacggcaacagtctaattccgccgtttaactctattccagggttagggacgaacgctgctttgaacattgtaaaagctcgcgaagaaggcgaattcctctcaaaagaagatttgcaaaagagagggaaagtatcaaaaacgattttagagtacttagatcgccacggctgtctggaatcactgcctgatcaaaaccaattgtcactgttctaatatggaatgcagaatttctcagaaattctgcttctatgcatacataagcgcaaaaagtgccatcgtaatattagagtttctgtcacttgcttaggtatgaaggtaagcgtatatccatttgcaataaaaatatggttatggtatagttttattggaaatgctaacgattaccgaggcaaagagtggggaaacccgctcttttgtattgaacaggagaattttgtctcgacatgttcatcgtttactttttagcccctgctcttttgaagcagggtttttatgcagagtgacgagacgaatatgagatcgacagcacaaggaggaagaacatgagcaaaaaagtgactgacaccgttcaagaaatggctcagccaatcgtagacagccttcagctggaactcgttgacattgaatttgtcaaagagggccaaagctggttccttcgcgtgtttattgattccgatgacggtgtggatattgaggaatgtgccaaagtaagcgaagctttaagcgaaaagcttgatgaggcagacccaatcagccaaaattactttcttgaagtctcatctccaggagctgagcgtccgctaaagaaaaaagccgatttcgaaaaatcactaggaaaaaacgtatacattaagacgtatgagcctattgacggcgtaaaagtgtttgaaggtgaactggctgaatttgatggacaaacagtgacagttgagatcacgatcaaaacaagaaagaaacggatcaatattccgtatgaaaagatagctaatgcaagattagctgttacattctaatgaatacaaatgttttaaggggggagaccgttaaatgagcagtgaattattagatgctctcacgattcttgaaaaagaaaaaggcatcagtaaagaaattatcatcgaagcaatcgaagctgcgttaatttctgcttataagcggaattttaatcaagcgcaaaatgtacgggtggatctaaaccgtgaaactggctccatccgtgtatttgcaagaaaagatgtcgttgacgaagtatacgaccagagattagagatctcaattgaagaggcacagggcatccatccggaatatatggtcggcgatgtcgtcgaaatcgaagttacacctaaggatttcgggcgcatagctgctcaaacagcgaagcaggtcgtcacacagcgtgtgcgcgaagctgagcgcggcgtgatctattctgaatttatcgaccgtgaagaagacatcatgacagggatcgtccagcgtctggacaataaatttatctacgtgtctttaggcaaaatagaagccttgctgccggttaatgagcaaatgccgaatgaaagctacaagccccatgaccgcattaaggtatatatcacaaaagtagaaaaaacaacgaagggcccgcagatttatgtgtcaagaacacatccaggcctgttaaagcgtttgtttgaaattgaagtgcctgaaatttatgatggaactgtcgagctaaaatctgttgccagagaagccggcgaccgttcaaaaatttctgttcgcacagatgatcctgacgtggatcctgtcggttcatgcgtagggcctaaaggccagcgtgtgcaagcaatcgtcaatgaattaaaaggtgaaaaaattgatattgtcaactggtccagtgatcctgtagaatttgtcgcgaatgcgctcagcccttccaaagtgcttgatgtcatcgttaatgaagaagaaaaagcgacaactgttattgttcctgattaccagctgtctctggcaattggcaaaagaggacaaaacgcacgcttagctgctaaactgacaggctggaagattgatattaagagcgaaacggacgcaagagaacttggaatctatccgagagaacttgaagaagatgatgagccgctctttacggagcctgaaactgctgaatcggatgaataagaggtgactttaggtgaataaacacaaaaagatcccattacgcaaatgtgtagtgactggtgaaatgaagcctaaaaaggaactgatccgagttgtacggtcgaaagaaggcgaaatctcagtagacccgaccggaaaaaagaatgggcggggtgcttatttaacgctggataaagagtgcatcttagcagcaaaaaagaaaaacactttgcaaaatcaatttcaatcacaaatcgatgaccagattttcgatgaattgctggaactggcggaaaaggtgaaaaaataaaatgtctggaatggaatggtttcccttgctgggtctggccaatcgagctcgtaaggtcgtgtcaggcgaagacttggtaataaaagaaatcaggaatgcgcgtgcaaagcttgtcctgcttacagaggatgcatcatctaacacagcaaaaaaagtaactgacaagtgcaattattataaagtcccttataaaaaagtcgagagtcgcgcggttcttggacgctctatcggtaaagaagcccgtgtcgttgtcgccgtcactgaccaaggttttgcgaataagctgatcagcttgctcgattaatatttttgggggtgaacgaatggctaaaatgagagtatacgaatatgcaaaagcgttaaatgtttcaagtaaggaaattttgaccgcactgaagaacatggatttagaagtgaataatcacatggccatgcttgaagaaaaggccattaaaaagctagatgccaaatataaaaaaggcggcgcagctgctaaatctcaaaagccagcagaaacgaacaaaaacaaacagccacaaggggttaatcagcaatcagctggaaatcaaccaaataaaattcgagacggaaagaagaatgacgtgcagaataatcaatttaacaaaaacaagaagaataacaacaacaaaaaaaataaacgcaacaacaacaataataaaaaccaacatcagcaaaagcctgtaaagccgaaaaaagagcttcctgagaaaattacattctctggcactttaacagttggcgcacttgctgaagagcttggcaaagagccttcagaactcattaaaaagctgatgcttcttggcgtaatggctaccattaaccaagagcttgataaagacacaatcgaactcattgcatcagaatatggtgttgaaacagaagaggtcattgtgcttgaagaaacagagctggaaaaatacgaagagcctgataatgaagaggatcttgaaattcgtcctcctgtcgtgacaatcatgggccacgttgaccatgggaaaacaacgcttcttgacagcatccgtaaaacaaaggttgttgaaggagaagcaggcggaatcactcagcatatcggcgcttatcaaattgaagagaacggcaagaaaatcacgttcttggatacaccgggccacgccgcatttacaacaatgcgtgcacgcggtgcagaagtaactgatattacgattcttgtcgtagctgccgatgacggtgtcatgccgcaaacagttgaagcgattaaccatgcaaaagcagcagaggttccaatcatcgtagctgtgaataaaatagataaagaatccgcaaaccctgaccgtgtgatgcaagaactgacggaatacggtcttgtccctgaagcatggggcggagaaaccatttttgtgccgctttccgctttaactggaaaaggcattgatgagctcgttgaaatgattttgcttgtcagtgaggtagaggaactgaaagcgaatccgaaccgtcaggcaaaaggaacggttattgaagctgaactcgataaaggcagagggtcagttgcgacgttgctcgtacagactggaacactgcatgtcggtgatccgatcgtagtcggcaatacatttggccgtgtccgtgcaatggtcaacgacattggccgccgtgtgaaaactgccggcccgtcaactccggttgaaattaccggtttgaatgatgtccctcaagcgggagaccaattccttgtctttaaggatgaaaaaacagctcgttctgtcggtgaagcccgtgcttcaaaacagcttgaagagcagcgcagcgataaagcgaagctcagtcttgatgatttattcgagcaaattaagcaaggtgatgtaaaagacatcaacctcatcgtaaaagctgacgttcaaggatctgctgaagctttaacggctgcgcttcaaaaaattgaagtagaaggcgttaaagtgaaaatcatccatacaggcgttggtgcgattactgaatctgacattatcttggcatctgcttccaatgcaattgttatcgggtttaatgtgagaccggacggaaatgctaagagtacggctgaagctgaaaatgtagatattcgacttcaccgtatcatttacaaagtaatcgacgagattgaagctgccatgaaaggtatgcttgatcctgaatatgaagaaaaagtaattggtcaagtagaagtacgccaaacattcaaagtatctaaaatcggtacaattgccggcggatatgttactgaaggaaccattacgcgcgacagcggcctccgtttaattcgtgacggcgtcgtcatctttgagggcgaagtagatgttctgaaacgctttaaagacgatgtgaaagaagtttcacaaggctatgaatgtggtattacaattaagaaatacaatgacattcgtgaaggtgacatccttgaagcgtttgtcatgcaagaaattgaaagaacgtgatcggatttgcggagtgtgaatgcatcatttatgatgcaggatcgctaaaagaaaagcgtgccgttctgaagcgggttttaactagggttcaaaacaagttcaatgtttcgatttcggagattggctatcaggacacctggcaaagaaccagcttcggaatcgccgctgtttcttcctctcgcgttcaaacagaaaaagaactgcagcgcgtcctagcgtttatcgattcttttcctgaaattgaacggacgatcactaggacagagtggttttaacttagaggtgattgaattgagtatgagagcaaaccgtgtcggcgagcaaatgaaaaaagaactcggtgatattatcagccgcaagctgaaagacccgagaattggttttctgacagtaacggatgtacgtgtatcaggtgatttgcaaattgcaaaggtgtatatctcggttctcggtgacgagaaaaaacgggaggaagcgctgaaagggctggcaaaagcgaaaggatttatccgatccgaaatcggcagccgcatcagacttcgaaaaacgcctgaaattgaatttgagttcgatgaatcaatcgattacggaaatcggatcgaaacactgattcacgaattacattcagagaaaccatctgaataaaaaaagagaggataggcgtatatcgtctgtcctctttcttcgtttataagaaaaaaactcaaaagaaggagtgaaaggcaaatggttaacggagttctccttttacataaacctgttggcatgacatcgcacgactgtgtcatgaagatccgaaagctgttaaaaacaaaaaaagtaggacatacaggaacgctcgatccggaagtatcaggcgtgcttccgatttgtgtaggaagagcgacaaaaatagtcgaatacttaactgaaaaatctaaaacgtatgatgcagaaataacattgggcttttcaaccacaacagaggatcaaaccggagaaacggtggaaacaaagcctgtcaatcacgacattgataaagcggatgtagaaaaggttttaaacagtttaaaggggaaacaagaacaaattccgcccatgtattccgctgtaaaagtaaacggcaaaaaattatacgaatacgcaagagcagggattgaagtagaacgtccgaaacgtatgataaccattgaagacattgccctgacaacagagattaaacatcatggagaaaccgcaagcttccggtttacagtgacttgctccaaagggacctatgtaaggacgctggcggtcatgatcggagaaaagctcggatatccggcccatatgtctcatttaatccgtacggcatccggagatttttctctcgacgaatgctttacttttgatgaactcgaagcacaggcccaatccggaaccgtggaagagcatacagttcctattgaacgtgcgctcaatcatttgccgaaatggatcataagtgatacattagctaagaaagtagaaaatggggctttgcttgagacgcccgagcagttttctgaaatgacaagtgaagaccgtattgccgtctttactgaatccggaacctgcttggcgatctatttccctcatcctgcaaaaaaagggctgttaaagccggcaaaagtattgatgcaaaaaagcgaacaatagaaaaaaggtgaccgttctgtgaagacgatacatattacacatcctcatcatttaataaaagaggagcaggcaaaatcagtgatggcgttaggttattttgacggcgttcatctcgggcatcaaaaggtaatcggcacagcgaagcaaatagccgaagaaaaaggtctgacattagctgtgatgacctttcatccccatccttctcacgtgttgggcagagataaggaaccaaaggatctgattacgcctcttgaagacaaaataaaccaaattgaacaattaggcacagaagttctgtatgtcgttaaatttaatgaagtgtttgcttctctttctcctaagcagtttatagaccagtatattatcggccttaatgtgcagcacgcagtggcaggctttgactttacgtacggcaaatacggcaagggaacaatgaagaccatgccggatgatttagacggaaaagctgggtgcacaatggtagaaaaattaacggagcaggataaaaaaatcagttcttcgtatatccgtaccgcgcttcaaaacggagatattgaattggcgaatgtcttgcttggacaaccttattttattaaaggaattgtcattcatggtgataaaagagggcggaccatcgggtttccgacagcgaatgtcggtttaaataacagctatatcgttccgcccacaggtgtatatgccgtaaaagcggaagtgaacggcgaagtttacaatggcgtttgcaatattggctataagccaacgttttatgaaaagcgccctgaacagccttccatcgaggtcaatctgtttgatttcgatcaagaggtatatggagccgctataaaaatcgaatggtacaaacggattcggagcgagcggaaattcaatggcatcaaagaattaacagagcaaattgagaaagataagcaggaagccatccgttatttcagcaatttgcggaaataacttgcaacgcacgcaaattttattctaaaatatttgcatataggcacgatttttagtatgatagttttcgtagtcttaaaaccattgcttggcaatccgaagtcaccgacggttgctaggtaactggggctaaatatgatttggaggtgaaacaggatggcaattactcaagagcgtaaaaaccaactcatcaatgagttcaaaacacacgaatctgatactggatctccagaagttcagatcgctatcctaactgactcaattaacaacttgaacgagcatttacgtactcacaagaaagaccaccactcacgtcgcggtcttcttaaaatggtaggtaagcgtcgtaatcttcttacgtatctgcgtaataaagacgtaactcgttaccgtgagttaattaacaaactaggcttacgtcgataatcgtaaaaagcgggaggattcccgcttttttatcgtattaaagcgaaatttcttataacaaatcattgaaatccttttacatactactttgacattgatatgttcaattcatttcgttcataataggagtaattgattatttcacacaacgaagagaggagttcgtaattgtatgggacaagaaaaacatgtctttaccatagattgggccggaagaacgcttaccgttgaaaccggccagcttgccaaacaggcaaatggtgctgtgatgatccgctacggtgatacagcagtacttagtacagcaaccgcttcaaaagaacctaaaccgcttgatttcttccctcttactgtaaactatgaagaaagattatatgcggtagggaaaattccgggcggatttattaaaagagaaggacgtccaagtgaaaaagcggttcttgccagccgtttaattgaccgtccgatccgtcctttgtttgccgatggattccgtaatgaagttcaagtcatcagcattgtcatgagtgttgaccaaaactgctcttcagaaatggctgccatgttcggttcatctcttgcactttctgtatcggatattccgtttgaaggaccgattgcaggggttactgtcggacgcattgatgatcaatttatcattaacccgacagtcgatcagcttgaaaaaagcgatatcaatcttgtcgttgccggcacgaaagatgcgattaacatggtagaagcgggagcggacgaagttcctgaggaaatcatgcttgaggccattatgttcggccatgaagagattaaacgcctgattgcattccaagaagaaattgttgcagcagtcggcaaagagaaatctgaaattaagctctttgaaattgatgaagagcttaatgaaaaagtaaaagctttggcagaagaggatctgctgaaagccatccaagttcatgaaaagcatgcccgtgaagatgccattaacgaagtgaagaacgcagttgtggcaaaattcgaggatgaagaacatgatgaagacacaatcaagcaagtgaagcagattttatccaagcttgtgaaaaatgaagttcgccgcctgattactgaagagaaagtaagaccggacggccgcggtgtcgatcaaatccgtccgctctcttcagaggttggcctcttgccaagaacgcacggttcaggtctatttacaaggggacaaactcaggccctcagcgtatgtacgctaggtgctctgggagatgtgcaaatccttgacggcttaggtgtcgaagagtcgaaacggtttatgcatcattacaacttcccgcaattcagcgttggggaaacaggaccgatgcgcggaccgggacgtcgtgaaatcggacacggagcactgggtgagcgtgcgcttgagccagttattccgtctgaaaaagacttcccttatactgtccgtcttgtttcagaagtgcttgaatcaaacggttctacatctcaagcaagcatttgcgcaagcacacttgcaatgatggatgccggtgtaccgattaaagcgccagttgctggtattgcgatgggtcttgtcaaatcaggcgaacattacactgtcttgactgacatccaaggcatggaagacgcgctcggagatatggactttaaagtagcgggaactgaaaaaggcgtaacggccctgcaaatggacattaaaattgaaggcctttccagagagattcttgaagaagcgcttcagcaggcgaaaaagggcagaatggaaatcctcaacagcatgcttgcaacattaagcgaatcaagaaaagagctttctcgatatgcgcctaagatcttaacaatgaccattaatcctgataaaatccgcgatgtcatcggaccaagcgggaaacaaatcaataagatcatcgaagaaaccggtgttaaaattgatattgagcaggacggcacaatctttatttcctctacagatgaaagcggcaaccaaaaagcgaaaaaaatcatcgaagaccttgtgagagaggttgaagtcggccaactttacctaggtaaagtgaaacggattgaaaaattcggggctttcgttgaaattttcagcggaaaagacggtttggtgcacatttcagagcttgcgcttgaacgcgtagggaaagttgaagatgttgtgaaaatcggagacgagattcttgtcaaagtcactgaaattgataaacaaggacgagtgaatttatcccgcaaagcggtgctccgtgaagagaaagaaaaagaagaacaacaatcttaaatgaaaacataaaaggagcctgggagacccggcttctttattttgaagcttttcaaaagcaggcgggttctaccttgtccctctccttcataatgtgagatgaggggggacagaacatgtacaaaaaatttgtaccgtttgccgtttttttatttcttttttttgtctcatttgagatgatggaaaatccgcatgcacttgattatataggggcaatgaaaaaagatacggtgactgtcacggcgtcaaaagacccgttatatgaagaattgcttcaaaaagcgccggagtacgaagttaagccccagaatgcaagaattgataaagtgtggaaaagcattccaggctacaatggattaaaggtcaatattgaacaatcatataaaaaaatgaaacagcatggtgagtttcgggaaaaagatttggtgtacagtcaagtaaaaccaagtgttcatcttgagtcacttcagcctgagcctatttataaaggaaatcctgacaaaccgatggtggcttttttaatcaatgtggcatggggaaatgagtatttggaaaaaatgcttcctattctgcaaaagcaccaggttaaagctacgttctttttagaaggcaattgggtgagaaacaatgtacagctcgctaagaagattgcaaaagacggacatgaaatcggaaatcattcatacaatcatccggatatgagcaaactgactacaggaagaatttccgagcagctcgacaagactaatgaacaaatagaacaaacgatcggcgttaagccaaagtggttcgctccgccaagcggaagtttcagaaaagcggttatcgacattgcagcagagaaacagatgggaacagtcatgtggacagttgatacaatcgattggcaaaagccggctccgtctgtacttcagacgagagtgttaagcaagatacataatggtgccatgattttaatgcatccgactgaccctacggcggaaagtcttgaagcgctgattacacagataaaagacaaaggatatgcgcttggaacagtcactgaactaatggatgaaacaagactattgaagtaacagatgaaggcagcttgtctttgaataggaggaacaaatttgattaaacgatatacgtgtcaaaatggtgtaagaattgtgctggaaaataacccgacagtccgttctgttgcgatcggcgtatggatcggcacaggttcgagacatgaaacgccggagataaacggaatttctcactttttagagcacatgttctttaaagggacgagcacaaaatctgcacgcgagatagcagaatcttttgatcgtattggcggccaggtcaatgcgtttacttcaaaggaatatacctgctactatgcaaaggtgcttgacgagcatgcgaattacgcgctggacgtattagcagatatgttctttcattcaacgtttgatgaaaacgagctgcaaaaagagaaaaatgtagtatatgaagaaattaaaatgtatgaagatgcgccggacgacattgtacatgatttactgagcaaagccacttacggcaatcattctttaggctacccaattctaggcacggaagaaacgcttgcttcctttaacggtgactctctcagacaatacatgcatgattattatacgccggaccgagtggtgatttcggtagcgggcaatatatctgacagttttatcaaagatgtagaaaaatggttcgggtcatacgaggcgaagggcaaagcgacaggccttgagaagcctgagttccacacggaaaaactgacgagaaaaaaagaaacagagcaggctcatttgtgccttggatttaaaggcttagaggttggccatgaacgtatttatgatttaatcgtcctcaacaatgtgctcggaggcagcatgagcagccggctgttccaagatgtgcgtgaagataaaggacttgcttattctgtttacagctatcacagctcatatgaagacagcggaatgctaacgatttacggcggaacgggtgcaaatcagcttcagcagctgtcggaaacaattcaagaaacccttgccacattaaaacgtgacggcattacctcgaaagaactggaaaacagcaaagagcaaatgaagggaagcttaatgctgagcttagaaagcacaaacagcaaaatgagccgaaacggaaaaaatgaactgctgctcggcaaacataaaacattagatgaaatcatcaatgaattaaacgccgtgaacttagagcgtgttaacggccttgccagacaattgtttactgaagactatgcattagcacttatcagcccttccggcaatatgccgtcttaaaaaggaaagcctgctccataatggagcaggcattttttaatccctttcatcatacatagtacaagggggtgacagacatgcggctcagtgaattatcaggaaaggaaattgtagacatcaaaagagctgaacggctcggagtgctcggccagaccgatttggaaatcaatgaacaggatggacagattacagcactcctcattcccacagttaagtggtttggtttgagaaagcaaggtcatgacattcgtgtcccatggcaccatattcaaaagatcggttcagatatgattatattagatgtacctgaggaaatgcctcctcgacaagagtaaatagcccaattgactgtgaagcgggctctaaagaaaacatctgaaacatcggctgccggagccgatgtttttttatatggaaaaagcgcatcttttatattcaccggtatttccttttgatcataagatgaaggggagcttaacaactagagatccagtatatacaaagaaggtgaacgtttagaatgttaaccggattgaaaattgcagttatcggcggtgacgcaagacagctcgaaattataagaaagctcactgaacagcaggctgacatctatcttgtcggttttgaccaattggatcacggttttaccggggcagtaaaatgcaatattgatgaaattccttttcagcaaatagacagcatcattcttccagtatccgcgacaacaggagaaggtgtcgtatcgactgtattttcgaatgaagaagttgtgttaaaacaggaccatcttgacagaacgcctgcacattgtgtcattttctcaggaatttctaacgcctatttagaaaacattgcagctcaggcaaaaagaaaacttgttaagctgtttgagcgggatgacattgcgatatacaactctattccgacagtagaaggaacgatcatgctggctattcagcacacggattatacgatacacggatcacaggtggccgttctcggtctggggcgcaccgggatgacgattgcccgtacatttgccgcgctcggggcgaatgtaaaagtgggggcaagaagttcagcgcatctggcacgtatcactgaaatggggctcgttccttttcataccgatgagctgaaagagcatgtaaaagatatagatatttgcattaataccataccgagtatgattttaaatcaaacggtactttctagcatgacaccaaaaaccttaatattggatctggcctcacgtcccgggggaacggattttaaatatgccgagaaacaagggattaaagcacttcttgctcccgggcttccagggattgtcgctcctaaaacagctgggcaaatccttgcaaacgtcttgagcaagcttttggctgaaatacaagctgaggaggggaaataaggatgtcgtcattaaaaggaaaaagaatcgggtttgggctgaccgggtcgcattgcacatatgaagcggttttcccgcaaattgaggagttggtcaacgaaggagctgaagtccgtccggttgtcacatttaatgtaaaatctacaaatacccgatttggagagggcgcagaatgggttaaaaaaattgaagacctgactggatatgaggccattgattcgattgtaaaggcagaacctcttgggccgaagctgccccttgactgcatggtcattgcgcctttaacaggcaattcaatgagcaagctggcaaatgccatgacggacagcccggtgctgatggcggcaaaagcgacaatccggaacaatcggcctgtcgttctgggtatctcgacaaatgatgctcttggtttaaacggaacaaatttaatgaggctcatgtcaacaaaaaatatcttttttattccattcgggcaagatgatccatttaaaaaaccgaattcaatggtagccaaaatggatctgcttccgcaaacgattgaaaaggcactcatgcaccagcagcttcagccgattctagttgagaattatcagggaaatgactaaatttacagaaaatctttcccaaactaaaaaattcggtcatagcccgcatattctatggtaaaataaaacgtaaaatcatagtcaaatcaattcaatgaagctgattggcggaaggagttttacagatgggaagaggtttacacgtagctgttgtcggagcgacaggggctgtgggacaacaaatgcttaaaacacttgaagacagaaactttgaaatggacacacttacattgctatcttcaaaacgctctgcggggacaaaagtcacgtttaaaggccaagagctgactgttcaggaagcttctcctgagagctttgaaggggtaaatattgctttgttcagcgccggcggaagcgtatcacaagcattggcaccagaagctgtaaaacgcggcgctattgttatagataatacgagtgcgttccgcatggatgaaaatacaccgcttgttgtgccagaagtgaatgaggcagacttgcatgaacacaacggcattattgccaatccaaactgctctacaatccaaatggttgcggcacttgaaccgatccgcaaagcatatggcttaaacaaggtcatcgtatcaacttaccaggcagtatcaggagcgggtaatgaagctgtaaaagagctttacagccaaacacaggcgattttaaataaagaagaaatagagcctgagatcatgcctgtaaaaggtgacaaaaaacactatcaaatcgccttcaacgcgattccgcaaatcgataaattccaagataacggctatacgtttgaggaaatgaaaatgataaatgaaacgaaaaaaatcatgcacatgcctgaccttcaagtagcggctacatgtgtgagactgccaatccaaactgggcactcagagtccgtctacatcgaaatagaccgtgatgacgctacagttgaagatattaaaaatctattgaaagaagctccgggcgtgacacttcaggatgatccaagccagcagctttatccgatgcctgctgatgctgtcggcaaaaacgatgtgtttgtgggccgcatccgtaaagacttggacagagcaaacggttttcatttatgggttgtttctgataacctattaaaaggcgcggcatggaactctgttcaaattgcagaaagcctgaaaaaactaaacctcgtataaaagagagaattttctaaagacgaatagaagagagtaaggcgctatcagcctgctctcttctgttacgtccgaataatttggagtgaaaacagtgaagataattgttcaaaagttcggcggaacatcagtaaaagatgataaaggccgcaaactggctttagggcatattaaagaagcaatcagtgaaggatataaggttgtcgttgtcgtttcagcgatgggccgaaaaggagacccgtatgcaacagattctttacttgggctgctttacggcgatcagtcagcgatttctcctagggaacaggatttgcttttatcttgcggagagactatttcctctgtcgtctttacaagcatgctgcttgataacggtgtgaaagcagctgcgctgacaggggctcaggctggctttttaacgaatgatcagcataccaatgcgaaaatcattgaaatgaaaccggagcgtttattcagtgtgctcgccaatcatgatgcggtagtcgtcgcaggcttccagggcgcaactgaaaagggtgatacaactacaatcggcagagggggcagcgatacgtctgcagccgcactcggagcagctgttgatgcggaatacatcgatattttcaccgatgtagaaggcgtgatgactgctgacccaagagtggtggaaaatgcaaaaccgcttcctgttgtgacgtatacggaaatctgcaacctggcgtatcagggggccaaggtcattcatccgcgtgctgtggaaatcgcaatgcaggccaaggttccgatccgcgtccgttcgacttattcgaatgataaaggtacattggtgacatcacatcactcttccaaggtcggcagtgatgtttttgaaaggctgattacgggaatcgcccatgtcaaagatgtcacgcagttcaaagtgcctgcgaaaatcggccagtataacgttcagactgaagtgttcaaggctatggcaaacgctggaatcagtgtcgatttctttaacattacacctagtgaaatcgtctatacggtagccggaaataaaacagaaacagctcagcgtattttaatggatatgggctatgatccaatggtgacgagaaactgcgcgaaggtatcggcggtcggcgcgggcattatgggtgttcccggtgttacgtccaaaattgtatcggctctttcagaaaaagaaattccgatccttcagtcggctgacagccatacgacgatatgggtgctcgtccatgaagcggatatggttcctgctgtaaacgctttgcatgaagtgtttgaactttcgaagtaaatgtgattgaatcatgatgaggtgaataaaatgaatttcggaaatgtgtctacagcgatgattacaccctttgacaataaagggaacgtagactttcaaaaactgtctacactgattgattacttgttgaaaaacggaacggattctttagtagtagcgggaacaactggagaatctccgaccctttcaactgaagaaaaaattgcgctttttgaatatacagtaaaagaagtaaacggacgggtgcccgttatcgctggtactggaagcaacaacacgaaagattccattaagctgacaaaaaaagctgaggaagcgggcgtggacgctgttatgcttgttaccccgtattacaataaaccttctcaagaaggaatgtaccagcattttaaagcaattgcggcagagacatctcttccggttatgctctataatgttcctggccgtacggttgcttctcttgctcctgaaacgacgatccgtttggcggcagacattccgaatgtggttgcgattaaagaagcgagcggagacctcgaagcgattacaaaaattattgctgaaacacctgaagacttctatgtctattcaggggatgacgctctgacgcttccaattctttcagttggaggaagaggagttgtgtcagtggcgagccatattgcaggcactgatatgcagcaaatgatcaaaaattatacgaatgggcaaacagctaatgcggcactgattcatcagaaactgctgccgattatgaaggaactgtttaaagcgcctaatcctgctccagtcaaaacagcgcttcagctgagaggtcttgatgtcggttctgtgcgtctgcctctagtcccgttaactgaggatgaacgtctgagcttaagcagcacgatcagcgaactgtaagaaaatttcatacagtgaaacaaacgcggtcattctcacattcagctgagtttgaccgtttcttttacatattggttttccctaaaccttctgctttatcttgttttctaaatttactttcagttataataggaacaagtgatgatggacgggtatgagactaggaggatatagattttgaaaaagaaaaatacagaaaacgttagaattatcgcccttggcggtgtcggagagattgggaagaacctttatgtcattgaaattgactcagacatatttgtcgttgatgccggccttatgcatccagaaaacgaaatgctcggtattgatgtagtgattcctgacatatcatatttgattgaacgggctgaccgcgtcaaggcaatctttttaacgcacgggcacgatgaaaatatcggcggcgttttttacttattaaacaagctgtccgttccagtgtacggaacaaaattgacgcttgcactgttaagagagaaattaaaacaatacggacataaccgaaaaactgatttaagagaaattcactccaaatctgtcattacatttgaatcaacaaaggtatcgttctttagaacgattcacagcattcctgattctgtaggtgtgagctttaaaacatcacttggatctattgtatgcacgggagacttcaaatttgaccaaacacctgcacttaatcagacgtgcgacattggcgagatcgccaagatcggcaatagcggcgtgctcgctctgctttctgacagtgcaaatgcggaacggccgggttacaccccttcggaagcggctgtcagcggagaaatttcggatgcgctgtataattcacagaaccgggtgattattgctgttttcgcatccaatattaaccggattcagcaagtcattcatgcagcggctcaaaatggcagaaagattgccgtagccggaaaaaatcttcaatctgtcctgcagctggcgagaaagttaggatacattgaagcagatgatgaattgtttatttctgtacaggatgtcaaaaaatatccgaagcgcgaagtggccattattacagccggaagccaaggtgaaccattagctgctttgacaagaatggcaaacaaagctcacaaacagctgaacattgaagaaggggatacggtggtcattgcgtcaactccgattcccgggcaggaactcatttactctaaaacagtagatcttcttgcgagagccggtgcacaagtcatctttgcccaaaagcgtgttcatgtatcaggccacggctcacaagaagagttaaagctaatgatcaacctgcttaaaccaaaatatttgattcctgtaaacggcgaatacagaatgcaaaaagctcattcaaaaatcgctgaagaaaccggcatgaagcgcagcgacatcttcttaattgaaaaaggcgacgtcgttgaattccgcggccaaaacgtaaaaattggggataaagttccttacggcaatattttaattgatggtttaggtgtcggtgatatcggcaatatcgtattgagagaccgccgcttgctttcacaggacggaattttaatcgttgtcattacacttgataaacaaaagaaaaatcttgtatcaggaccagaaattatcactcgcggctttgtttatgtaagagagtctgaaggtctaatcgtacaggctactgagctcgtccggtccatcgtgacagaagcgactgaaacatcaaatgtcgaatggtcaacgctgaagcaggcaatgcgggatgctttgaaccaattcctttatgaaaaaacgaaacgtaaaccgatgatcatcccaattattatggaagtataatgactgactaaagaccggagttgctccggtctttattttttgtccttcaagccgggattgaatgaagtatctttgttcataatacaaagagaaactcggaaaggatgaaagcgagatggatcatcgtatggaaaacacagaagaagagcgtcctgaaaaaaatgatgcgaaggacagcattatgaataaaatacagcagcttggtgaaacgacgcttccgcagctgccccaagatacaaatattcattgtctgaccattatcggacaaattgaaggccatgttcagcttcctccgcaaaacaaaacaacaaaatatgaacatgtcatcccgcagattgtggcaattgaacaaaatcccaaaattgaaggcttgctgatcatattaaatactgtcggaggagatgttgaagctggtcttgccatagcggaaatgcttgcatctttatcgaaaccgaccgtttctatcgtgcttggcggggggcattccatcggcgttccgattgctgtatcctgtgattacagctatatcgccgaaacagcaacgatgacgattcatccagttaggctcaccgggctggtcatcggggtgccgcaaacgtttgaatacctggataagatgcaagaaagagttgttaaatttgtgacaagccattccaatataaccgaagagaaatttaaagagctaatgttttcaaaaggaaacttaacacgcgatatcggaacaaatgtagtcggtaaggatgcagttaaatacggattgatcgatcacgcaggcggtgtcggacaggcaatcaataaactgaatgagctcatcgacgaagcaaggaaagaagaaggacggatgattcaatgattctttataccgtgatgccgcaggaaattgtgtttgcagaacagaaccaagagacaagcgcacatgagcaaattgaatataaaggtgtaccgcttctagtcgaaatgaaagggaatgaagcggaagtcattcaaatcatgagcaccaatccaatgcattttctgcatccggacatttcacccggacaaaagctgaaattaaacgtataagaatccaacccttttttaagggcaaaatatgctataataggggaatcctacagaaaaaacgcagcctgtaaacggctgctttcttcattatgtatgaacttacattttttaacgcagtaaggtgatgagtgtggcaaagaaaaaacgaaaatcaagaaaaaaacaggcgaaacagctaaatataaaatacgagctcaacggattgctgtgtatagccatttcaattatcgcaatcttgcagctgggggtagtcgggcaaacgtttatctatttgttccgcttttttgctggagagtggtttattttatgcttgttaggtttattggtgttaggagtctcactgttttggaagaaaaaaaccccaagccttttaacgagacgaaaggccgggttgtactgtatcatcgcaagcatattgctgctttctcacgtgcagctatttaaaaatttgacgcacaaagggtctattgagtctgcaagcgtggtgcgcaatacgtgggaattgtttttaatggacatgaatggcagctctgcttcacctgatttaggcggagggatgatcggtgcgctgctgtttgcggcttcacactttttgtttgcgtcgactggttctcagatcatggcaattgtcatgattttgatcggaatgattttagtaacaggacgctcgctgcaagaaacgctaaaaaagtggatgagcccgattggacgttttataaaagaacaatggttagcatttattgatgatatgaaatccttcaaatcaaatatgcagtcatcgaaaaaaacgaaagcgccgagcaaaaaacaaaaaccggcccgcaaaaaacagcaaatggaaccggagcctcctgatgaagagggggattatgaaacagtatcgcctcttattcattcagagccgattatctcaagcttttctgatcgtaatgaagaggaagagtctccagttatagaaaagcgccccgtacctgtgtcgaagccgcttcaggacatccaaccggagacaggtgatcaggaaactgtttctgctcctcctatgacctttacagagcttgaaaataaggattacgagatgccgtcactggatttgctggcagatccgaagcataccggccagcaggctgataaaaagaatatttatgaaaatgccagaaagcttgaacgcacattccaaagctttggcgtaaaggcgaaagtcacacaggttcatctcggaccggctgtaacaaaatatgaagtatatcctgatgtcggagtgaaggttagcaaaattgtcaatttaagcgatgatttagcgcttgcgcttgctgcgaaggatatcaggatcgaagcgcctataccaggcaaatcagcaatcggaattgaagttccaaacgcagaagtggcaatggtttcgctgaaagaagtgctggagtctaaattgaatgacagaccggatgcgaagctgttaattggactcggccgcaatatttcaggtgaagctgtattggctgagttaaacaagatgccccaccttttggtcgcaggcgcaaccggtagcgggaaaagtgtctgtgtcaacggcattattacaagtattttaatgcgggcgaaaccgcatgaagtgaaaatgatgatgatcgatcctaaaatggtagagctaaatgtctacaacgggattccgcatttgcttgctcctgttgtaaccgatccgaaaaaagcgtcgcaggctttgaaaaaggttgtcaatgaaatggagcggcggtacgaattattttctcatacgggtacaagaaatattgaaggatacaatgattatataaaacgcgccaacaatgaagaaggagcgaaacagccagagctgccttatattgttgtcattgtggacgagctagccgatctcatgatggtcgcttcatctgatgtggaagattcgattacgagattgtcccaaatggcgcgggctgccggcatccatcttattattgcgacacagcggccatcggtggatgttatcacaggggtgatcaaagcgaacattccgtcacgaatcgcgttcagcgtatcttcacagacggattcaaggaccattcttgacatgggtggcgctgagaagcttcttggccgcggcgatatgctgtttttacctgtaggggctaacaaacctgtccgtgtgcagggagcatttttgtcggatgacgaagtggagaaggtcgtcgaccatgtgattacgcagcagaaagcgcaatatcaagaagaaatgattcctgaggagacaacagaaactcattccgaggttactgatgaactttatgatgaagctgttgaattaatcgtcggcatgcagacggcatctgtttcaatgctgcaaagaagattcagaatcggctatacgagagcggcgcgcctgattgacgcaatggaggaacgcggtgttgtcggaccgtatgaaggcagcaaacctagggaagtattattatcaaaagagaaatatgatgagctctcttcttaatgaagggagttccgctctctatagttgtcaataataacattatgtaaactgatcacctttctatttattttttcgacaaaacatgatatagttgtcccaattgttcaataatttttatcgaaagtggtttacggaggggaaacatgtctacaaaagctgataatcggcacttgtatttgaaagtaattgaacgaattaaagaggatataaaaaatgggatctacactgagaaggaaaagctgccttctgaatttgagctttccaaaaagcttggtgtcagcagagcgacgctaagagaagccttgcggatactggaagaagagcatgtgattatcagaaggcatggtgtaggcacttttgtccattctaagccgttatttctttcgggcattgaacagctgaacagtgtaaccaagatgatagaacaggcgaatatgacccctggcacgatttttctatcatcacaagtgcttatgccgtctgaagatgatacgaagagatttcatttggcagaagggcaagaacttttttaccttgaacgagtcaggacagctgacggacagccgattgtgtattgtatagacaaaattccgatgaatattttgccgaattctttttctcatcagcaagaatctatgtttgaccttcttgagaaaaattcaggctccgtaatcagctatgcagtaactgatatagaaccgatcggctatcacgataccatttctccagtgcttgaatgcgatcctgaaacagcccttttgctgttaaaacaaacccattacgatcagcacgataaaccggtgctttattctttaaattattttagagcggataaattcagatttcatgttttgcgtaaacgattctaaaaacggacgcctgtatgtgtctgtttttttatttgcactgattcatgtttctttgtacatactttcattccggttaacgcaatatataagggatgacaagaaagtgaatgggtgaaaatgttgagagagaaaaatggaatgaaaaatattattgcattgtcttctgtcccgcttgtgatgacactcgggaactccatgctgattcctgttcttccgatgatggagaaaaagctgtctgtgacttcatttcaagtatctttaatcattactgtatattcagtagtagcaattatttgcattccgattgccggatatttgtcggatcgtttcgggagaaaaaaaatattgcttccatgcctcctcattgcaggattggggggagccgtagctgcttttgcctcgacctatatgaaaaatccttatgctatgatcttggcggggcgggttcttcaaggcattggttctgcaggtgccgctccgattgtcatgccgtttatcggcgacctgtttaaaggagacgatgaaaaggtcagcgcgggtcttggcgatattgaaaccgccaacacgtcagggaaggtactgagtcccatacttggagccttactggcttcttggtattggtttgtaccgttttggtttattccgtttttctgtttgatcagctttttgctcgtattgtttttggtggccaagcctgaagaagatgaagatgcgcctgctgtttctgagtttattaagagtgtgaagaaaatttttaaacaggatggtcgctggctttatacggtcttcattatcgggtgtgtcattatgtttttgttatttggcgtattattttatttatcagatacgctggagaacaagtatgctattgacggagtagctaaaggcggattactggcaatcccacttttgtttttgtcaaccagttcttttatagctggcaaaaagatcggtaaagataaaggccgaatgaaattttgcgttgttacaggaatgattctgttaaccctttcgtttattgccttgtggtggaaccacagtttttattttttatttgtctttttaagctttggcgggattgggattggaatggctcttcctgctttagatgcattgataaccgaagggattgaaagtgaacaatgcggaaccatttcctccttctacaatagcatgcgctttataggagtagctctcggtccacctgtttttgctgcattaatgtctaatgcaaactggattattttcatactctcggcgttttgcagcatcgtttctttatttttagtgctctttactgtagatgctaaaaaaagtgaagaagaagaaaaaaacttagggacggtctagccagccgtctttttttgcgcttccttgcacagtttacaactgtacctatacagcatgcggaggttattgtttccttataaatcctacagttgctataattacatgaaagagtgtttctgcgaatgctgaaaattggtcataatacatactaattaagaaatgaacgaaggaggttccatatgtcatatgttaatgaactcaaatcaaagcacggcggtttaaccgcacacattgtaaaaacagaaaaattcaaaaccgtctcgcttatttttaagatgcttgcgccgctgacaaaggatcaagtcaccaaaagagcgctgcttccgcatgtgcttcttcgcggaacgaaaagccatccgaaaaccgcagaattgcgttcatacctggatgagctgtacggcacgtcagtatcggctgaccttacgaaaaaaggagagcggcacgtcattacgttcaggcttgaaatcccgaatgaaaaatatttaaaagaccaaacgccgctacttgagaaagggctccagcttcttgcagaaatcgtcttttcacctgctttagagggagacgcttttcagtcacaatatgtggctcaagaaaaacggacgcttaagcaaagaatccaagccgtctatgatgataaaatgcgctattcgaatttaaggctgatacaggaaatgtgcaaaaatgagccttacgcgcttcatgtcaatggtgaaatcgacgatgttgatgacattacggcagagcaattatacgaaacataccaaagcgctatccaaaaagaccagcttgatctatatgttgttggcgatgtggacagtaaccaggtacaatcggcaattgataagtatttcaaaacagaagagcgcactcttggcacgattgaaaacaatcacgctgatgaaaaagttcagccaaaagaagtaattgatgaagaggatgtcaagcaaggaaaactgaatatcggctaccgcaccagcatcacttatacagatcaggattatcctgctttacaagtgtttaacggattgttcggcggattctctcattctaaacttttcattaatgttcgggaaaaagccagtcttgcttactacgcggcttcccgtatagaaagttttaaaggcttgttaatggtgatgtcaggcattgaagtgaaaaattttgaacaggcggtttcgattattgctgagcaattccaggcaatgaaaaatggcgatttcagtgagcaggatatagcacagacaaaggccgtcattcgaaatcaagtgctggaaacgattgatacagcatacggtttatctgaatttttatatcagcaggctgctgctcaagtcgagattcctatcgaagactttcttgccaatattgagaatgtcacaaaagaggatatcattaaagccggcgaaaagattcagcttgatacgacttatttcttaaaagggacggagggtgcatcttgatcaaaccaatcgaatatgaacagcttcaggagacgctgtatcatgaaaaaatgtccaacggccttgatgtttacgttttgccgaaaaaaggcttcaacaagacatatgcggtctttacaacaaagtacggctcgatagataaccggtttgtccctttaggtaaaaacgagatggttcacgtgccggacgggattgctcactttcttgagcacaagctgtttgagaaagcggacggagacgtttttcaagatttcagtaaacagggggcttctgccaatgcgtttacgtcatttacaagaacggcttaccttttctcaagcacatcaaatgttgaacgcaatttagagacgcttatcgattttgtacaggacccatattttactgaaaaaacggttgaaaaggaaaaagggattatcgggcaggagattaatatgtacgacgataaccctgattggaggctttacttcggggtcattgaaaacatgtacaaagagcatcctgtcagaattgacatagcgggaacagtggaaagcatttcacatattacaaaagaccttctttatgaatgctatgaaacgttttatcacccgagtaacatgctccttttcattgtcggccctgtagatcctgaagcgattatttctcaggtaagagaaaaccaggggaaaaagccgtatactgatcagccggagatcaaacggaaagaagtgaaagagcaagaagcggttttccgaaaagaaaaagagatcaaaatgaacgtgcagggaccgaaatgccttgttgggctgaaatccaaaaatccgtttaaattaggcaaagagctcttaaagcatgaactttcaatgaacttattgcttgaagctctttttggcaaaagctctgcccagtatgaatcactttatgaaaaaggatatattgacgaaacgtttagctttgattttactgctgaatatgggttcggttttgcggcgatcggcggagatacgcctgagcctgatcaattagctgaagacatttcaagcatgcttttgcgcgccggtgaactgattactgctgaaaagattgaacttgccagaaagaaaaagatcggcacattcttaaaagcgctgaattcccctgaatacatcgccaatcaatttacccgttatgcgttcttggatatgagcctgtttgacgttgtaacggtactcgagcagattaccctcgaggatgtccagaacgtaatacaagaggaaatcgctgcagacaggctgactgtctgcaaggttgttcctaaatcataaacaaaacatccctccagtgtgaggggtgtttttctgcggaaagaaggaaagagaatgaacaaaacagcactaatcaccggagcaagcggcggcattggcaaaagcatcagcgaaacccttgcggctaaggggtacaatctgctgctgcattacaatacaaatcaaaatgcggcagcggagcttgctgaaaaactaagtcagatgtttggcgtaaatacggagatattacaagctgatctgtccgcgcaagatggagcagataagctgacaagttcaattgttcagccggttgatgcgattgttttaaacagcggacgaagccattttgggctgattacggatgtagataacgcaacggttcaggaaatggttcagcttcatgtagcgagtccgtatatgctgacgagaaaccttctgccaggcatgattcggaataaatcgggagcgattgtggctgtcagctcgatttggggagagactggggcatcctgtgaagtgctgtacagcatggcaaaaggagctcagcattcgtttgtaaaaggattggctaaggagctggcgccaagcggaatcagggtaaacgcagtagcgccgggcgcagttgatacaaatatgatgaatcaatttaccccggctgaaaaagaagagatcgctgatgagattccgatcggccggctggcccggccgcaagaaattgcggatgcaacagcttttctcctgtctgaaaaagcgtcatatatcaccggccaaattctgtcggtgaatggcggctggcactgctgatccgaaaatattcggtgtatagtttcttttgcgaaggacacaataatcttgtaacttcacatgaaatggaggaaacaagcatgtcagtattagaaaactgggatagctggaaaaacttccttggcgaccgtctaaactatgcgcaagataaaggtatgagccaggatacgattacagatcttgcgacagaaatcggcagctacttggctaatgaagtggaatctaagaacgagcaggaaaaagtgctggcagatctttggagtgtagcatcaaaagatgaacagcacgccattgccaatatgatggttaagcttgttgaaaataacagcactcactaggaagagaggggatttttcctctcttttttatgttttcctcatcacagcaacattcttctttctaattagagaaaaatgctttatgataaaggaaggtaaaattttgccacaatgaagggggtatatcatttggcaaagctcgaatggtattttgaatatgaaattcaagtgaaccgccccggactgctcggggatatttcatctcttcttgggatgctttctatcaacatcgtaacgataaacggcgtcgatctttccagaaggggaatgctcctcaggtgccgccatatagatcaaattaaacgattagaatcaatcttaaaaacgatggaaacaattaaagtaacgaagcttagagaaccgaggcttcgcgaccgtcttgccgtacgccacggccgttatattcaacgggatgccgatgacaagaaaacgttccgctttgaacgggacgagcttggcttattagtcgattttatggccgaattgttcaaaaaagaaggccataaattaatcggaatcagaggtatgccgcgtgtggggaaaacggaatcgattgtagcctctagtgtgtgtgcaagcaaaaggtggctgtttgtgtcatcaaccttgctgaagcagacgataagaagccagctgattgccgatgaatacagcactgaaaatgtctttatcgttgacggaattgtgtcaacacgaagaggatcggaacgccatctccagctggtccgagaaatcatgcggctgcctgcaacaaaagtggtggagcatccggacatattcgttcaaaatacagagtatacattagatgactttgattatattattgaactgagaaatgaccctgatgaggttattacatatgaacatgccgaggaaccccaaatgtttgatcaatccgggttttcaagctttgatttttaaaattggaaggtgtttgttgtgactgaactaggaatccggctcaaagaagccagagaggaaaaagcaatgtcattggatgatctccaagcggcaacaaagattcaaaaaaggtatttaaccgccttggaggaaggaaactatgacattattccggggaagttttatgttcgggcattcatcaagcaatatgcagaagccgttgggcttgatgcggatcagctgtttgaggagcataaaaaagatatccctaatacgtatcatgacgatgtgtctgaaaagatctccggcatgaatcttcaaaaggaaatgccaaagccagcatctaaggcgctggagctgctgccaacgatacttgttattctcggcgtgattgttgtgattgccattgtgtacgcgatcattcaatttgccaatcacaaaaacagtgatgatcacaatgcggcatcagaaaaagcaattacgcaaagtgagagcaaatacgaaatccctaaagattcaacgctgaaagagaatcaaaataacagctctgaaaaagagacagacactaaaaaagaaacgaaagaaaacgaagataagaaaaaagaaaatgacagtgagaagctggagattaaagctgctggcactgaaggatcgttaacgacttatgaagtgtccggcgctgataaaatcgagctggaactgaaggcatcagacagctcgtggattcgagtgcgcgatgaaaacagcagctctttaaaagaaggaacgctgaaaaaagacgaaacctataaaaaagacataactgatcagaaacaagttgatatccgcaccggatatgcacctaatctgaaaataaaaatcaacggtaaggttctttcatatgaacttgatccgaaaaaagtgatggcacaaaccataaagattgtaaataaaaaggaagaaaagtcatcttaattatcagatgacttttcttcacgtccgagtatgaaattggaggggctttatgtttaacttaccaaataaaatcacactagctagaatcgcattaatcccaatcttcatgattatcatgctggcgccgtttgactggggcaggctcgaagttggagacgaatcaatcccggtcgcacatttggcgggggccattctatttattattgcatctacaacagactgggtggacgggtattatgcccgaaaattgaatctcgtaacaaacttcgggaaatttcttgatccgcttgcggacaaactgctcgtatccgcagcgttaattatccttgttcaatttgatctcgctccagcttggatggtcattgtgattatcagcagggagtttgccgtgacaggtttaaggcttgttttggccggaacaggagaagtcgtagctgctaacatgcttggtaaaatcaaaacctgggcacagattattgcggtatccgcattgcttcttcataatcttccatttgaacttgtgtcattcccgtttgcggacttggcgctgtgggtagccgtcttctttactgtcgtttcaggctgggaatatttctctaaaaactgggaagcgttaaaaacatctaactaagaaagaaggacttcgtcatggaatttccaaaaaaagcagaaataattgcagtcggttcagagctgctgcttggccaaatcgccaatacaaatgctcaatttatcagcaaacagctcgctgaaatcggggtcaacgtattttatcatacagcggtcggagataacccggagcggctgaagcaggtcatccgcattgctgaagaacgctctgacttcattattttttcaggagggcttggacccacaaaagatgatctgacgaaagaaacgattgcaaatacgctgggacgtccgcttgtgttaaatgatgaggcattccaatccattgaggactatttcaaacgaacaaaacgcacgatgtcacctaataaccgaaaacaggcgcttgtgatcgaaggctctgacgtgctggcgaatcactttggaatggccccgggaatgctcacagagcatgaatcgcgctattatatgcttcttcctggaccgccgagcgaattgcgtccaatgtttgaaaacgaggcaaagcctcttctgctgaaaaagatgggttcaaatgaaaaaattgtgtcaaccgttcttcgctttttcggtatcggtgaatctcagcttgaagccgatttggaagatattattgatgcacaaaccaatccgacaattgcgcctttggcggctgatggagaggtgacgctgcgtctgacagccaaacacgccgatgaaaaggaaacagagcgtctgttaaaagaaacagaggccgttatcttagagcgtgtcggtgaatttttctatggttacgatgatacttctcttgtaaaagagctatctatagcgtgtaaggaaaaaggcataacaatttctgcggcagaaagctttaccggagggctgttttctgaatggctgacggatcatagcggtgcctcaacattatttgccgggggcgttgtttgctatacaaacgacgtgaagcagaatgtgcttggtgtcaagaaggaaacattagatcgttttggggcggtcagcaaggagtgcgcatccgaactggctaagggtgttcaaaaactcactggcagcgatatcggcattagctttactggtgtagcaggacctgatgctcaagaagggcatgagcctgggcatgtgtttatcggcatttccgcaaacggtaaagaagaggttcacgagtttcactttgcgggctccagaacggggatcagaaaacgcggcgctaaatacggctgccatttaatcttaaagcttttagagcaaaaataatattttcagcacattatcctcctaagaaaacatgatttctctgatacattatgatattttgataggaatcacgccaagaaaaaatccgaatatgcgttcgcttttttcttggcaaatcccttcaaacagggtatagtatatgtagtggtaacataaaggaggaaaaaatagaatgagtgatcgtcaggcagccttagatatggctcttaaacaaatagaaaaacagttcggcaaaggttccattatgaaactgggagaaaagacagatacaagaatttctactgtcccaagcggctccctcgctcttgatacagcactgggaattggcggatatcctcgcggacggattattgaagtatacggtcctgaaagctcaggtaaaacaactgtggcgcttcatgcgattgctgaagttcagcagcagggcggacaagccgcgtttatcgatgcggagcatgcgttagatccggtatacgcgcaaaagctcggtgttaacatcgaagagcttttactgtctcagcctgacacaggcgagcaggcgcttgaaattgcggaagcattggttcgaagcggggcagttgacattgtcgttgtcgactctgtagccgctctcgttccgaaagcggaaattgaaggcgacatgggagattcgcatgtcggtttacaagcacgcttaatgtctcaagcgcttcgtaagctttcaggggccattaacaaatcgaagacaatcgcgattttcattaaccaaattcgtgaaaaagtcggtgttatgttcgggaacccggaaacaacacctggcggccgtgcgttgaaattctattcttccgtgcgtcttgaagtgcgccgtgctgaacagctgaaacaaggcaacgacgtaatggggaacaaaacgaaaatcaaagtcgtgaaaaacaaggtggctccgccgttccgtacagccgaggttgacattatgtacggagaaggcatttcaaaagaaggcgaaatcattgatctaggaactgaacttgatatcgtgcaaaaaagcggttcatggtactcttatgaagaagagcgtcttggccaaggccgtgaaaatgcaaaacaattcctgaaagaaaataaagatatcatgctgatgatccaggagcaaattcgcgaacattacggcttggataataacggagtagtgcagcagcaagctgaagagacacaagaagaactcgaatttgaagaataaaaataaaataagtttcaaatgatacaaaaggctgagtgaaaaactcagcttttttgtattttgcaaaaaaatgataaaaatattgctttttttgacaacttttttagggctttattcgtctaacaaaacgtgtgcaaaatggaatttattttgggaggaaaaaatgaatgacaagcccaacccgcagaagaactgcgaaacgcagacggagaaaactaaataaaagaggaaaactgttgcttggtcttttagcagtgatggtttgcattacgatttggaatgctcttcatcgaaatagtgaagaaaacgaaccatctcaagaaactgcagcggtttcaaataccgatcagaaaaaagaggtcaaaaagaaaactgccgaaaaatcagaggaacaaatcaaaacagtggatcgaaaccaaaaaatcagcaattatttaaaagagatcggtttcagcggaacagccatgattgtcagaaatggagaaatcgtaacaaataaaggttttggctatgctgaccgtaaacactacattcaaaataatccattgacatctttttatgtcggttcatcacaaaaagcgctaattgcaactgctattttgcagcttgaggaaaaggggaaacttcagacaagtgatccggtaagtacgtatttacctcattttcctaacggacaaacgattactttgaagaatctgcttacacatacatcggggataaacggacatattgaaggaaacggcgccattactccggacgatttaataaaagatatagaacttcagggaatcaaacgtcagccgggcgtatgggactacaaggattccaactattctgttcttgcttatattattgctgaagtaagcggtgagccctatgaacagtacataaagaatcatatttttaaacctgcgggaatgacgcatgcaggcttttacaaaacatatgaaaaagaaccttatcctgccgtcgggtataagatggagggcagcaaaacagttacaccgtatatacctgatttatcccagctgtatggagcgggtgatatttatatgagcgctatagatatgtacaaatttgaccaagcgctgatagacggaaaactgtattcgcaaaaaagctatgaaaagatgtttacgccagggagcagctccacatacggcatgggattttatgttgctcccggaagctattcaaaccatggtgttatgccgggcttcaatatcttgaacagctttagcaaatctgggcaaaccattgttattttgttctcaaacattcaaaataatgctaaattgggccaagtgaacaataaaatataccagcttctaaatcaagaatgattggcgatcttcttttggatgaattgcattcggcacgtgaaaagaagactggcctgcaaacgttaagatggcaagcttgacaagtatttccgacacatttacaatgaagttgtaacatttgtttttttaacatgattgttaaaccatttaaacttgacaagggcgatgaacacactcattccctgtgaaggttctgtatgttgagaaaactagacaatgtacatgccgacactttttaagcaacaaccaagttcatagcaagaggaggtgaaagtatgaccccaattatgatggttctcatctccattttgctgattctactcggtttagttgttggctactttgttcgtaaaaccattgccgaagcgaaaattgcgggcgcacgcggtgcagccgagcaaattcttgaagatgcgaagcgtgatgctgaagcactgaaaaaagaagctctgcttgaagcaaaggatgaaatccacaaacttcgaatagatgctgaacaggaagttcgtgaaagacgaaatgagcttcaaaaacaagaaaaccgtttactccaaaaggaggaaaaccttgatcgcaaacatgagggaattgataaacgggaagcgatgttggagaagaaagatcattctctgaatgaacgacaacaacatattgaagagatggaaagcaaagtggatgagatgattcgtatgcagcagtctgagttggaacgaatttcgagtctaactcgtgacgaagcgaaacaaatcattcttgagcgggttgaaaacgagctttcacatgacatcgccatcatgacaaaagaaactgaaaaccgtgcgaaagaagaggcggataagaaagcgaaaaacattctttcactcgccttacagcgctgcgcagcggaccacgttgccgaaacaacggtatcagttgtcaatcttccaaatgatgagatgaaaggacgtatcatcggacgggaagggcgtaacattcgtacgcttgaaacgctgacaggaattgacctgattattgatgatacgcctgaagctgtcattctttccggatttgatccgatcagacgtgagacagccagaattgctcttgataaactcgttcaggatggccgtattcatccggcacggattgaagaaatggttgaaaaatctcgccgcgaggtcgatgactatattcgtgagatgggtgagcaaacgacatttgaggttggcgttcatggcctccacccagatctcatcaagatcctcggccgcttaaagttccgtacaagctacggtcaaaatgtgcttaagcattccatggaagtcgcattcttggccggtctaatggcatcggagcttggtgaagacgcaaagcttgctaaacgtgcgggtcttcttcacgacatcgggaaagcaattgaccatgaagtagaaggaagccacgttgagatcggggtagagcttgcgaccaaatataaagagcacccagtcgtgattaacagtattgcatcacaccacggggacgaggagccgacttccattattgctgtactggtagctgcagcagatgcgctttccgctgcaagacctggcgcaagaagtgagacgctcgagaattatattcgaagacttgaaaaactcgaagaaatttctgagtcctacgaaggtgttgaaaaatcatttgccattcaggctggacgcgaagtgcgaattatggtgaagccggattcaattaatgatcttgaggctcatcgactggcgcgagatatccgcaagcgaattgaggacgagctcgattatccaggtcatattaaggtgacagtaatcagagagactcgagccgtagagtatgcaaaataaagtgatgcgctaagcatcactttatttttttgacggcaaggaattttcaagaagaaaggatttacaaaatgagaattttatttatcggagatgttgtcggttcaccgggccgtgacatggtcaaagaatatgtaccaaagctaaaaacaaaatataagcctcactttaccattattaatggtgaaaacgccgcacatggaaaaggcctgacggaaaaaatttatcacagcttaatccagtccggggcagatgcaatcacaatggggaaccacacatgggacaaaaaagaaatatttgattttatagatgacgttccgaacttggttcgcccggcaaactttcctgaaggaacaccggggaaagggatcacatatgtgaaagcaaacggcaaagaactagcagtcattaatttgcagggacgtacgtttttgccgccgcttgatgacccgtttttaaaagcggatgaattgatcgcagaagccgcgaaaagaacaccgtacatttttattgactttcatgccgaagcgacaagtgaaaagctcgcacttggctggtacacggatggacgggcatcggctgtagtaggaactcatacacacgtgcaaacagcggataaccgcattttgccgaagggaacggcatatattactgatgtgggaatgactggcccgtatgacggtatactggggatggacagagagacgattattaagcgattcaaaacgaaccttccagtccggtttactgtcgctgaaggaaaaacaacgctcagcggagttgtcattgacattgacgatcaaacgaaaaaagccgtgaaaattgagcgtattttaatcaacgatgatcacatgttctttgaatagttgaacatatggttattttataaaaatattaaaaagaaaagcaggaatatagcaactccttagtgaatatagtaaaaatggaaggtagcccgctatttttgaaaagcattgtggggatggctttttggatagcaacatctaataatgattgttctaatgaacactcacttatccattgtaaaactaagggggagcagaaatggaaatcttaaaagtttcagcaaaatcgagtccaaattcagtggcaggtgcgcttgcaggcgtgttgagagagcgaggagccgccgagattcaagcgatcggagcgggtgcattaaaccaggctgtaaaagctgtggcgattgccaggggatttgtggcgccaagcggcgttgatttgatttgtattccggcttttacagatattcaaatcgatggggaagaaagaacagcgattaaattaatcgtggagcctcgctaaaaacaaataaagcattctcaacctgtttgcgtaatgcaaacaggttgtttttcatttattgtgatattttctcccgatagtatttttagcacataaatgagcgaatatacaaaatcagaaatgagctaaaacgtttcaaaaaaaatttccgcccatttttcaagacagatacttttgtccttctggaaaagacagtgctgtttacgcttattccatatcatggtacaatccgaatataacaagaatttttcaaggaggattgtacatgcagagtggaaagatgaaagctctaatgaaaaaggacggggcgttcggtgctgtgctgactgaagttcccattcctgagattgataaacatgaagtcctcataaaagtgaaagccgcttccatatgcggcacggatgtccacatttataattgggatcaatgggcacgtcagagaatcaaaacaccctatgttttcggccatgagttcagcggcatcgtagaggacgtgggagagaatgtcagcagtgtaaaagtgggagagtatgtgtctgcggaaacacacattgtttgtggtgaatgtgtcccttgcctaacaggaaaatctcatgtgtgtaccaatactgctataatcggagtggacacggcaggctgttttgcggagtatgtaaaagttccagctgataacatttggagaaatcccgctgatatggacccgtcaattgcttccattcaagagcctttaggaaatgcagttcataccgtacttgagagccagcctgcaggaggaacgactgcagtcattggatgcgggccgattggtcttatggctgttgcggttgcaaaagcagcaggagcttctcaggtgatagcgattgataagaatgaatacaggctgaggcttgcaaaacaaatgggagcgacttgtactgtttctattgaaaaagaagacccgctcaaaattgtaagcgctttaacgagtggggaaggagcagatcttgtttgtgagatgtcgggccatccctcagcgattgcccaaggtcttgcgatggctgcgaatggcggaagatttcatattctcagcttgccggaacatccggtgacaattgatttgacgaataaagtggtatttaaagggcttaccatccaaggagtcacaggaagaaaaatgttttcaacatggcgccaagtgtctcagttgatcagttcaaacgtgatcgatcttgcacctgttattacccatcagtttccgttagaggagtttgaaaaaggtttcgaactgatgagaagcgggcagtgcggaaaagtaattttaattccataaagggggataaacatgacgaaggaatttgagtttttaaaagcagagcttgatagtatgaaagaaaaccatacatggcaagacataaaacagcttgaatctatgcagggcccatctgtcacagtgaatcaccaaaaagtcattcagctatcttctaataattacctcggattcacttcacatcctagactcatcaacgccgcacaggaggccgttcagcagtatggagccggcaccggatcagtgagaacgattgccggtacatttacaatgcatcaagagcttgagaaaaagttggcagcctttaaaaaaacggaggcggcacttgtattccaatcaggcttcacaacaaaccaaggcgtactttcaagtattctatcaaaagaggacattgtcatctcagatgaattgaaccatgcctctattattgacggaattcgactgacaaaggcggataaaaaggtgtatcagcacgtcaatatgagtgatttagagcgggtgctgagaaagtcaatgaattatcggatgcgtctgattgtgacagacggcgtattttccatggatggcaacatagctcctctgcctgatattgtagagctcgctgagaaatatgacgcatttgtgatggtggatgacgcccatgcatccggagtacttggcgaaaacggcaggggaacggtgaatcacttcggtcttgacggcagagtgcatattcaggtcggaacattaagcaaggcaatcggagtgctcggcggctacgctgcaggttcaaaggtgctgatcgattatttgcgccataaaggccgtccatttttattcagcacatctcatccgccggcagtcactgcagcttgtatggaagcgattgatgtcttgcttgaagagccggagcatatggagcgcttgtgggagaatactgcctattttaaagcaatgcttgtgaaaatgggtctgactctcacgaagagtgaaacgccgattcttcctattttaattggtgatgaaggtgtggcaaagcaattttcagatcagctcctttctcgcggtgtttttgcccaaagtatcgttttcccgactgtagcaaagggaaaagccagaattcgcacgattataacagcagagcacaccaaggatgaactggatcaggcgcttgatgtcatcgaaaagacggcaaaggagctccagctattgtaacaagaggaagagtttactcttcctcttttgattccttattgattattattctcaatgagtgtacaatgataggttgccagttgtgcagagcttcaataacctttatactgaagggtggaagtttggtttgaaaggagaaaatatgacatgaatgaaaaacaaaaattagagagcggacaagttaatccatcggacaaaaaatccgagaaggattacagcaagtactttgaagctgtttacattccgccttctttaaaagacgcgaaaaaacgaggcaaggaagccgttacttatcataatgactttaaaatttctgaacaatttaaaggattgggagacggaagaaagttctatatccgtacgtacggctgccaaatgaatgaacacgatacagaggttatggcagggatctttagggcgctcggttacgaagcgacaaactctgttgacgatgccaatgtcattttgttaaatacatgtgcaatccgtgaaaatgctgaaaacaaggtgtttggtgagctcgggcacttaaaagcactgaaaaaaaacaatcccgatctgattttaggcgtgtgcggctgtatgtcccaagaggaatcagtcgtgaaccgtattttgaaaaaacatccgtttgtcgatatgattttcggaacgcataacattcatcgcctgccggagcttttgtcagaagcatacctttcaaaagaaatggttgtagaagtttggtctaaggaaggggacgttattgaaaaccttccgaaagtccgaaatggaaaaattaagggctgggtcaatatcatgtacggctgtgacaaattctgtacgtattgcattgtgccttacacacgcggaaaagaaagaagccgccgccctgaggatatcattcaggaagtgagaaggctcgcaagtgaaggctataaggaaattactctgttaggccaaaacgtaaacgcgtatggaaaagactttgaagatatgacgtacggacttggtgatttgatggatgaactgagaaaaatcgatatcccgagaatccgttttacaacgagtcatccgcgcgactttgacgaccgcctcattgaagtgctggcaaaaggcggaaatctgcttgatcacattcatcttccggttcaatcaggaagctcagaagttctcaagctgatggcccgcaaatatgacagagagcgttacatggagctggtgcgaaaaattaaagaagcaatgccaaacgcttctttgacaacggacattatcgtcggatttccaaatgaaacggacgaacagtttgaagaaacgctttctctataccgtgaagtggagtttgacagcgcctatacgttcatttactctccgcgtgaaggcactccggctgctaagatgaaagataatgtaccgatgcgtgtgaaaaaagaacgcctgcagcgtctaaacgcactggtgaatgaaatttctgctaaaaaaatgaaggaatacgaaggcaaggttgtcgaagtattagttgaaggtgaaagcaaaaataaccctgatattcttgcgggctatactgaaaaaagcaagcttgttaatttcaaagggccgaaggaagccatcggcaaaatcgtccgcgtgaaaatccagcaagcgaaaacatggtcgcttgacggagaaatggtaggagaagcaatcgaggtgaaataagatgacgctctactcaaaaaaagacattgtgcagcaggcacgaaaccttgcaaaaatgatctctgaaacagaagaggttgattttttcaaacgggctgaagcgcaaatcaatgagaatgacaaagtgtccacaatcgttaatcagattaaagccctgcaaaagcaggctgtcaatctgaagcattatgaaaagcatgaagcgctcaaacaagtagaagcaaaaattgacgcgctgcaagaagagcttgaagagattcctgttatccaggaattcagagactcgcaaatggaagtaaatgacctactgcagctcgttgcacacaccatttccaaccaagtcacaaatgaaatcatcacatcaaccggaggcgacctgctgaaaggggaaaccggttcaaaggtgaagcattcaaataacagctgttctctctaaacacggtgcctttacaggcccgtgtttttttatgtgtgggttatgaactaaataatctatgtaccaaatgttcaattggtttttctgtgcgcagccgcgtgtaaactttatcgcacttataagtaaagtttctaggctcacctgcatacaatggaacagaaactttgtatttttatattttatttataaaaatgcacactagacaaatgcccagcataagataacacgaagaagaacaaggaggcatgccggaatgtctgaatacagggaaattattacgaaggcagtagtagcgaaaggccgaaaattcacccaatgcaccaacaccatctcgcctgagaaaaaaccgagcagcattttgggtggttggattattaaccacaagtatgacgctgaaaaaattggaaaaacggtagaaattgaagggtattatgatataaacgtatggtactcttacgcggacaacacaaagacagaggttgtcacagaacgggtaaaatatgtagatgtcattaaactcagatacagagacaataattacttagatgatgagcatgaagtgattgccaaagtgcttcagcagccaaactgccttgaagtgaccatttcgccgaatggaaataaaatcgttgtgcaggcagaaagagaatttttggcggaagtggtaggggaaacaaaggtagttgttgaggtcaatcctgactgggaagaggatgacgaggaagattgggaagatgagcttgatgaagagcttgaagacatcaacccggagtttttagtgggagatcctgaagaataaaaaagggactaggggagacagtacccccaagtctcttttttatattgatatatcattcttttatcactttttgtttatgttataatgaaggttggaaaatagaaacgttgatacatagtgagggattaaacaatggccggttatacgcctatgatacagcaatatttaaaaataaaggcagagcaccaggatgcctttttattttttcgcctgggtgatttttatgaaatgttttttgaggacgccaaaaaagcgtcacaagagctggaaattacgttaacgagcagagatggcggtgcggctgaaaaaataccgatgtgcggtgtgccgtatcattctgcttccgcgtatatcgaacagcttattaaaaaaggatacaaagtggcgatctgtgaacagacggaagatccgaaagccgcaaagggcgttgtgaaaagagaagtggttcagctgattacgcccggaactgtaatggacggcaaaggcatccatgaatcggaaaataattttatcgcatctgtttcagcctgctcgaacggatacggacttgcgctgtctgatttaacaacgggagaaaatttggctgttttgattgaacggcttgaagacgtcatatcagaaatttattcagtcggcgcacgggaaatcgtggtttcaggaagcttggatgccgatacagtggcacagctgagagagcggtgcggtgcaacgatctcaattgaagatggagaaacagacgaacacgtaacgatcattgagcacttaaataatgaagatataacaaaaacatttatgcgcttatatacgtatttgaaaagaacccaaaagcgcagccttgatcatcttcagcccgtgcaggtgtatgagcttgaggaagcgatgaaaattgacttgtactcaaagcgtaatctggagctgaccgaaacgattcgttcgaaaaataaaaaaggctcccttttgtggctgctggatgaaacaaaaacggcaatgggaggccggctgcttaaacagtggattgaccggccgcttatcagagtcaatcaaatcgaagagcgccaagaaatggtggaaacattaatgtcccatttctttgaacgggaagatctgcgtgaacgtttaaaagaagtatatgacttagaacgccttgccggacgcgttgcattcggaaatgtcaatgcccgggatttgattcagctgaaggaatcgttaaagcaagttcctggcatcaaacagctggttgcttcactggctcatgacaaggccaaggaacgtgcagagcgcattgacccttgcggggatgtacttgaactgctggaagaagcgctgtacgaaaaccctcctttatcggtaaaagaagggaatctgattaaagatggttataatcaaaagcttgatgaatatcgtgatgcaagcagaaacggaaaagactggattgcccgcctggaacagcaggagcgggaatacacaggcattcgttctttaaaggttggctttaataaagttttcggttattacattgaagtgacaaaagcaaatttgcacttgcttgaggaagggcgttatgagcggaagcagacgttaaccaatgcagagcgctacattacacctgaattaaaagaaaaagaagcgctcattttagaggcggaaaataacatctgtgaactggagtacgagctgtttaccgagctgcgcgagaaggtgaagcagtatattccgcggctgcagcagcttgcaaaacagatgagcgagctggacgcactgcaatgctttgcgacaatcagtgaaaatcgtcactacacgaaaccggagttctctaaagatgaagtcgaagtgattgaaggcagacacccggttgttgaaaaagtcatggacagccaggaatatgtcccgaacaactgtatgatgggcgataacagacaaatgcttctcattacaggtccaaacatgtcagggaaaagcacgtatatgagacaaatcgcgctcatttccattatggcgcaaatcggctgctttgtacccgcgaaaaaagcggtgcttccgattttcgatcaaatttttacgcgaatcggcgctgcagatgatttgatttccggacaaagtacatttatggtagaaatgcttgaagcgaaaaatgcgattgtcaacgcgacgaaaaacagcctcattctgtttgatgaaatcgggcggggaacgtccacttatgacggcatggcgctggcacaggcgattattgaatatgttcacgatcatatcggcgccaagacgctgttcagcacacactatcacgagctgaccgttcttgaggacaagctgccccagctgaaaaacgttcatgttcgcgctgaagaatataacggaacggttgtctttcttcatcaaattaaagaaggtgccgctgataaaagctatggtatccatgtagctcagcttgccgaactgccgggagatctgattgctcgcgctcaagatattttaaaagagcttgagcattcaggaaacaaaccggaagtgccggtgcagaaacctcaggtgaaagaagagccggcacagctgtccttttttgacgaagcggaaaagccggctgaaacaccaaagctttcaaaaaaagaaaagcaagtgatcgatgccttcaaatcacttaatatactggatatgacaccgcttgaagcgatgaatgaaatgtacaagctgcaaaagaaattacattaaaacggggtgatgaatgtggcaaaagtcatccagctgtcagatgagctttcgaataaaatagcggcgggcgaggttgtggaacggcccgcctcagtcgtcaaagaattggtggaaaatgcgatcgacgctgacagcacagtcattgaaatcgatattgaggaagcaggccttgcatccattcgggtcttggataacggcgaaggaatggagaatgaagattgtaagcgtgctttccgccgccacgcaacgagtaaaataaaagatgaaaatgatttattcagggtgagaacgctcggtttcaggggagaagccctgccgagtatcgcgtcagtctctcatctggagattacaacaagcactggtgaaggagctgggacgaagctcgtcctccaaggaggaaacatcatttccgaatcgcgttcctcaagcaggaagggaactgaaattgtcgtttccaacctgttttttaacacaccggcccgtttgaaatatatgaaaaccgttcatacagagcttggaaacattacagatgtggttaaccgtattgctctggcgcatccagaggtatcgatccgcctgcgccatcatgggaaaaacctgcttcaaacgaacggaaacggagatgtgcgccatgtactggcagcgatttacggcacggctgtcgccaaaaaaatgcttccgctgcatgtgagctccttggattttgaagtaaagggatatatcgccctcccagagattacacgggcgtcgagaaactatatgtcgtctgtggtcaatggccgttacattaaaaatttcccgctcgtcaaagcggttcatgaaggctatcatacgcttctgccgatcggacgccatccgattacttttatagaaattacgatggacccgattttagtcgatgtcaacgtgcatccatcgaagcttgaggtccggctcagcaaggaaacagagcttcatgacttaatacgtgacggaattaaagatgtgtttaaacagcagcagctgattcctagtgcccaggtcccgaaaaaatcagcacctgccatcaaaaatgagcagcagtttataacctttgatgaaaagcctccggaaaaaaaagttccggaaaaatcgactgcgccatcttattcaccgatgaagctcagctcagtcgtaaaagagccggttgatgcggaggaaaaattgccccctctccaatttgatgctcctcctatcgttgatcaggaacaaacccttgaggtgtccgatgtttcagcagaacagcctgaaacatttgagcaggaatgccatgaggaacagccgcagccagcgtctgatcgggttccaattatgtacccgattggccagatgcacgggacttatatattggcacaaaacgaaaacggcctatatattatcgaccagcacgccgcccaagaacgtattaaatatgagtacttccgtgaaaaggtgggggaggttgagcctgaggtgcaggagatgattgtaccgctgacgttccactactccacaaatgaggctttgattattgaacagcacaaacaagagctcgaaagcgtcggtgtctttttagagtcattcggctctaacagttacatcgtccgctgccacccagcctggtttccaaagggagaagaagcagagcttatagaagaaatcattcagcaggtgctcgactccaaaaatatagatattaaaaaactccgcgaggaagcggcgattatgatgagctgcaaaggctccatcaaagcaaatcgccacctcagaaacgacgaaatcaaagcgcttctggacgacctccgaagcacatcagacccatttacatgcccgcacggccgcccgatcatcattcaccactcgacatatgagatggaaaagatgttcaaacgcgtgatgtagcgggggtggtaggcattgatccattctctgaatggatcaatgctttttttgtactccttcgagtgtcagattataagaaacggttgtaaacgtgtgagcagtgttaaagcattatacttcatggtccctccgtataacgaaatttccatttacaggcaattagaattaatgtatattttgggtgagggggtggaaacacatggcatgtggtccgaagatcattatctttttggatgaacttgatgatccgaatgtaagaatcattttagaatgcagaatttaaattacaacattgtgttttgctccctgttcgtgtgaacagggagttttttcgtttatataactggtgatgtccaaatataaggtgttatgaattctccatatctgccatcggcattttaagctgcttctctattaggctggtcatcaaaagcaagttcagtgaaagccatcactgctgatatcacaacaagcaagatatctggaatataaatagactgcataaagtaatctgcaaaacagatcgttataagattgctgataaaatacagtataaaagcaaaaagtgcagtctttttcaatgaaagtgattttgccaaaatgatagagataatctttgtgagtgggtctatgattaaacctacagcaaagcaggctaaaataaataaagctaatgtttgattggaagcgtatgtgatgcccagtatggagaataagcctttcatcccgaagaaaaagccgccgaagatgactgcaagcgcaatggccgcgataaaagtgatagatacaattccgattaattttgatctgaggttaaaatctttagagtgctcgttctgttctttatggttcaagtatgacactcccttcacctgcttactcatacaaacagcacccttgaatcagcccaaaatatctataagtctgttttctgacgaaaatagtatagcatattttaacaaaaccaaaaaaggccctttccactggggaagggcctttttcatcatgttaactcctgagattcgccgaagctttctctttttttggccaaataaaatagctggctgtaatgagaaagtcaattcctataatgacagtccacagtttaagaatgccgctcaacgcctcggttcgggaagagtcattgataaaatagatcatccctgccaatagtcccgcaccaattaagtaggccagcacatgtcttagccagcctttcgcaccgtgtttggcatgatccattccaaaacgtttcagcggttttgcgcctttttttgtcacataatattgaaatttttcatctgcccattgaatcatttgtttcccataagcgatcgatataccgatgtaaacagctgcaatcccatgggctgcggtcgctgaggctccgcggtaaaggtccacaccagttgccgctaacaagatcaaatcgataactggagttaaggcaaggaatagcagtcctaatgtatgtcgtttgaatacgtagcgtacagcaagccccaaaacaatgacaacccaaaacgcaatttcacagaaaacaatcatccatgcgataccgttcaatccattcccctcttttcaatacagttgtattatttaaataatatgttaccatctttgtttttgtaacacaactgtattataaaaattgccctctcatttttttcttgttacaataaagctatgccaaaacaaattgaccatgagaaaagaagaaaacaaattgcagaagcaacgtggcgcgtcattttagaacgagggatggagggagcatcagccagaaatattgcaaaggaagcaggattgtcattaggtgcgctgcgccattatttctctacacaggatgaattgcttgcttttgcaatgaaacttgtccaagaaaaggtgacggaccgaattaaggacattgcagtgagggatttgctccctaaggaaaaagtgttgcaaattttgcttgaaatggtcccgacgaatgaagaaacgattagagagatggaggtttggtttgcttttactgcttacgccagacataaaaaggatatgtttgatgcgaatcatgacgggattttcagcggcatgcggaatctgattgcctatttagatgaatccgatttactgaagccgaatgctgataaagacattgaagctgagagactttacgcgcttgttgacggcttggctttacatgccatgcttgaccctgtgcgagtgaataaagaccgaatcaagcgggtcattatgcagcatgtagagtcaatttgcgtggaagatacacgtgagacacaaaaacgtcatccttaaggcactagtgcgaaaagcgattcttgttgggcatgcgtccaaaagagtcgcttttttatattcaaagaacaaggatctctgaaaaaaatggaaaacgatcatgctgtttggtaaagtggaatgaaagacggactgaggagtgaacactggtccatcgtttaagaactttacatgatagggatggtataaatgaatcttacttacaaagtgcatccaattaaaacaaggtatcagggctggacgaattattgctatatcattgaagatattgtaagcagatctgcaattgttgttgatccctcatgggaattgagtaagataaccactacactttctgaactcgaagcggaattaaaggcagtcgcattgacacactctcattatgatcatgtaaatctggtagacccgctgacgaagatgtttaacgctcaagtttatatgtcaaaaaaagaaattgattattatcaattccgatgcagaaatttaattagcctagatgatcatcagacaatcagcataggaaacacaagagcacaatgtcttctcacaccggggcatacagccggcggaatgtgttatttgttttctgagagtatttttaccggagatacggtgtttacagaagggtgcggcatatgtgaggatgatggcagctctgcggaagagatgtttgatagtattcaaagaataaagtcggaggtttcacctcatgtacgggtgtatcctggtcactcatttggcaaatcgcccggtcattcgataaaggatctttatcagcataatatttactttcaaattgataaaaaagaatattttgtgaaatttcgcactcgtaaaaaccaaaaaggtatttttgattttaaataatccttctgaatctattatcctatttttcttcgaatatctaaatgatttttattttcaaaaatgattacatagaaggtgttatttattttgaaaactcatttgaaagaaaatgaagcgcattatcatgatatggcgccctatacgtgatctgggtcttttttcttatgttctgttatatctcctgatcctttattcctcaatggaaaaaagcagaaaaacaatcgagcaaactgtaggaaaaattaacttgacggataatatttacagaggttaccatcaacatgaacatgctactatttatccggtcatcactattataaaatcatacagaagtgaaatacatctactaatcggaagggtggctttgagagaatgatcacatatgtttttccaggtcagggttcacaaaaacagggaatgggcagcggcctattcgatgaatttaaagaactgacggatcaggcagatgagatcttaggatattctatcaaacgtctttgcctggaaaatccttattccaatttaaacaaaacgcaatttactcagccggcattatatgtggtaaacgcactaagctatctgaaaaaaatcaaggatgaagaagttaaacctgactttgtcgccgggcacagcttgggtgaatacaatgcgttatttgcagctgaagcctttgattttgagacaggtttacagcttgtcagaaaaagaggcgagctgatgagtctgataagcaacggcggtatggcagctgttatgggactaaatgaagagcaggttgcaaaggctctgaaagaatatcatttacatgatgttgatatcgctaatgtgaatgccccatatcaaattgtaatttcaggaaaaaaagatgagattgaaaaagccgcatctctttttgaaacgatgactgaagttacaatggtactccccttaaacgtaagcggcgcgtttcattccagatacatgaataaggcaaaagaagaatttgaggagttccttcatgccttttatttttcgcctccgtctatcccagttatttctaatgtgtatgccaaaccgtatacatacgaattcatgaaacagacgctggctgatcaaattaatcattcagtgaaatggactgacagtataagctacttaatgaaaaaaggccatatggagtttgaggaggtagggcctggaaatgttttaactgggttaattcatcgcataaagaaagatgcggaagcaatgcccagctaaagcatttgcccctatggccgtgcacctcatcaatcaggtctaaacacagatttcctttcatttaaggtataaagttttaaagattcaatcgttcgattgacactgtttctaattgaataactttatatactgttacataaagaggctgataaattaagttagacatttgaactatgtcagccggtctgtcaaaccatcgctcccacatctagatggtccattttttaaccgcacccaccaatcatagagtcgatgttctttgctgatcctgttatcatgttacatcaattttgagatatcaacatacatctacgatcacgtcataaatgaaccgcatccagagcaccaatagcaatccttccaagttgaatctcctttactttttcacatatgtcttttccgtttattaatttcatttcaatcgctgctatgtgctttaacaacatgcatggaaatgagaaatccaatagccgtcataaatataaaaaaagaaggttatacacatgaatgaaccgcttgtttttatgttttccgggcaaggttcccaatactatcacatggggaaagaactatttaaggaaaataccgtgtttcgtcaatcaatgcttgaaatggatgccattgcagcacggcgaatcggcacatccattgttgaagaaatctaccatccaggtaaacgtgtgtcagatccgtttgacagtattcttttttcccaccccgccatttttatgattgagtattccttatataaggttttggaagacaggggaatttatcctgattacgtattgggatcaagtctgggagaattcgcagcagcggcagtttctggtgtgtcagacgcagaggatatactggattgcatacttgaacaggctattatcatccaaaattcctgcgataaaggaaaaatgatggccattctggacaaaccgcaattgctgaatgattatccgcaactgtttggaaatagtgaactcatttctatcaattatgattcgcacttcgtcatttctggtgaagaagatcatataaggaagattatggaggatttaaaggagaagcagattctttgccagctgcttcctgtgtcctatgcctttcattcttcgcttattgatccggcagagagtgcctatgcagaatttttaagatcaaaatcttttcaaaaaccgtcaataccgattgtatcgagcttaacgggaagctgccttcacgtaatggacgagaatttcttttggaatgcggtcagaaagccaatgatgtttcgtgaagcgattcgatatttggaaagccagcatacatgcaagtttatcgatttagggccatccggcaccttagctgcttttgtgaaacagctgattccgggtgatgcagctgaccgttgctgctcaatcataacaccatttcatcaggagctgaaaaatctgaatacggttgagtattaccgtacaccagaaaggaagtttacaagatgattacatatgtctttccagggcaaggctcccagcaaaaggggatgggacaagggctatttgaacagtatcagcatttgacagatcaagcagatcaaatattgggctattcaatagagaagctatgtaccgaaaaatcatatctggatgtaaatcatactgaatacacgcagccggctttgtatgttgttaatgcactcaattacttgaagagagtggaggagaccggcagaaaacctgattttgcggcaggacatagcttaggagaatacaatgcgctgatggcagccggtgcctttgattttgaaaccggattaaggctcgtcaaaaaaagaggagaattgatgggacgaattacagggggcggaatggctgctgtgatcggcctgagtaaggaacaagttacagccgttttagaagagcaccgtcttcatgacattgatgtggcaaatgaaaatacgccccggcaaattgtgatttctggcccgaaaaaagagattgaaaaagctcgggctgtttttgaaagcaccaaggatgtaaagctgtttcatccattaaatgtgagcggagcttttcattccagatatatgaatgaagccaaacaggtatttaagcaatatattgactcattccagtttgcacctttggcgatcccggttatctccaatgtctacgcagagccataccatcaagacagattaaaagatacattatctgaacagatggacaacacagtgaaatggacggacagcattcgtttcctgatgggaagaggagaaatggagtttgaagagattgggcctggaactgttttaaccggtctcattcatcggattaaaaatgaagctgaaccattgacatatataccgaaaaagaaccccgcgatcagtgcgcatctaaaggagaaacgcaatgttcaagctgggattacggcagaatctttaggaagtgctgaatttaaacaagattatcatcttacatatgcttatcttgcaggaggaatgtaccgcggcattgcttcgaaagaaatggtagtaaagctgtcaagagcgggaatgatggggttctttggcacaggaggtctgagcctgaaagaggttgaagatgcgatccatgctatacaaggtgaattagggaaaggacaagcctatggcatcaatctggtccacaatatgaaacatactgaatcagaagaaaaaatgatcgatcttttattgaggaatcaagtgagcattgtggaggcttcagcatttctaagtgtcactcctgcattagtaaggtaccgcgcaaaaggagtgaaacgaaatcaaaatggtgacgttatatgctcaaatcgtctcatagcaaaaatatcacggccggaagttgcagaatcatttctgagtcctgcgcctgagaatatgctgcaaaagcttttaggagaaaataaaatcactatgaacgaagctgagttgttgcggtgcattccgatggctgacgatatttgtgtagaagctgattcaggcggtcatacagatggcggtgtggcatacagcctgatgccggcgatgacatctttaagagatgaaataatgaaaaaatatcaatttcggaaaaaaataagagttggtgcagctggagggattggaacacctgaggcagcgatggcggcttttatgctaggggctgattttattctaacaggctcaatcaatcaatgtacggttgaggcggcaacaagtgataaagtaaaggatttgcttcagcagatgaatgtacaagatacagcctatgcgcctgcaggtgatatgtttgaatcgggcagtaaagtgcaggtgctaaagaaaggcgtgttctttcccgcacgggcaaacaagttatatgaactgtaccagcggtatgggtctatacgtgagctggatgcaaagatgctggcccagcttgaggagaaatactttaaacgcagtatagaagacatatataaagatattgcattgcattatcccgcggcagacattgagaaggctgaacaaaacccgaagcataaaatggctttgattttccgatggtacttcagatacagctcaaaattggcaatcagcggaagcgaacattcgaaggtcgattatcaaattcactgcggtcccgcgctgggagcctttaatcaatgggttaaaggatcgcaattagaaaattggcgaaaccgccatgtggatgaaattgggaaaaaaataatgacagaaacggcagtattgcttcatgaacggatgcaatcgatgtatcagccgtcgcatgaaacagacaacataaaaatgaaagtttgaatattatgaaaaaatacctataaaaatcattaaaataatccctcgaaggagagagcgtattatggataaacagagaatctttgaagtactaatcaccaatatttgcgaggtgcttcctgaattagacggacacagatttgagcctgaagatcagctagttgagctaggagctgactctgtagacagagctgaaattatcacgatggtgctagaggatttatcgctaaaaattcctcgcattgagctatccggggtgaaaaacatcggtgaattagctgaggtgctttatgacaaagtgcaatctgcctgaggtggtggtgaccggtgtaggcgttacggcctccatcggtcaagggaaagaggactttgcttcctcgctgctgtccggcagacatgcctttgatgtcatgaagcgttcaggcagacaaaaagacagccggtttatcggagccgaaattgcgtcattgtcttatcctgaccgactctccaaaaaaatgttgcgaaaagcatcattctccagccgcgctgcattggtaactctcacagaggcttgggaggaggctgaattggacgatgcagattcctcacgtatcgggctggttgttggcgggtcaaattttcaacagagagaaaactttgaagtttatgaaaggtatcaagaccgctccggttttatttctccggcgtatggcctgtctttcatggacagcgatctttgcgggatatgtacagatcagtttggcatcacgggattagcatatacggtgggaggagcctcggccagcggccagttagcagtcattcatgcgattcagcaagtcctgtcaggcgaagttgatacttgcattgcacttggtgctttaatggatctttcttatatggaatgcgaggcgctaagggctttaggcgctatggggacggacaaatatgctgatgaacctgaaaaagcgtgccgtcccttcgatcaaaacagagacgggtttatctatggagaatcgtgcggtgcattggtaatagaacgaaaggagacggctttacgaagaggtcttaaaccttatgcagcattgtctggctggtcaatcaaactggacggaaaccggaatcctgatccttcattagaaggagagattcatgtcatccagcaggcactggagcgtgccaggcttttaccagaagatattgattatattaatcctcatggaacaggctcttttattggagatgaaatagaattaaaggcgctccgtgcatgccggctttcccatgcttatatcaatgcaacaaaatcgataaccggacacgggcttagtgcggcgggcatcgtagagattatttctgttttgctgcaaatgaaaaaatctgccctgcatccgagcaggaatttggatcatccaatcgatgattcctttcattgggtaaatgagaaatcgatttcataccgcatcaaaaatgcgctgagtttaagcatggggtttggcggaatgaacaccgcggtttgtatacaaaacattgagaaatgtggaggcgaatcataaatggtttcagccggaatagaagcgatgaatgtctttggcggaacggcataccttgatgtcatggagctggccaaatacagacacttagatactgcgagatttgaaaacttattaatgaaagaaaaagcggtagcactgccttatgaagatcccgtgaccttcggagtcaatgcagctaagccgattattgatgctttatctgaagcagagaaggaccggattgaattgctgatcacttgctctgaatccgggatcgactttgggaaatcgttaagtacatatatccatgaatatttaggtctcaaccgcaactgccgtttgtttgaggttaaacaggcgtgttattcagggacagcgggatttcagatggcggtgaattttatattatcccaaacttctccgggtgccaaagcactggttatcgccagtgatatttcacgttttttaatcgctgagggcggagacgctttaagcgaagattggtcttatgcggaaccgagcgccggagcgggagcggtggccgttttagttggcgaaaatcccgaggtgtttcaaatagatcccggagcaaatggttattacggctatgaagtgatggacacgtgccgccccattcccgacagtgaagcgggagattctgatctgtctttaatgtcatatttggattgctgcgaacagacctttctggaatatcaaaagcgtgtaccgggtgccaattatcaggacacgtttcaatatcttgcttaccatacgccctttggcgggatggtgaaaggtgcgcaccggacaatgatgcgtaaggtggcgaaggtgaaaacatccgggattgagacggattttttaactcgggtaaaaccaggtttaaactactgtcaacgagttggaaatattatgggggcagccttgtttctggcattggccagcacgatagaccaagggagatttgatacgcctaaacgaattggctgtttttcctacggatccggctgctgttctgaattttacagcggaattacaactccgcaaggccaggagcgtcagcgaacatttggtattgagaagcatttggatcgccggtatcagctctccatggaagagtatgagctattgtttaaggggagcgggatggtgcggtttgggacgcgcaatgtaaagctggactttgagatgataccgggcatcatgcagtccactcaagagaagccgcgcttgtttttagaagaaatttctgagtttcatcggaagtacaggtggatctcgtgacctatcaaacgataaaggtccgctttcaagcgtcggtttgctatattacctttcaccgtcctgaagcgaataatacgattaatgatacgctgatagaagaatgcttgcaagtgttaaaccaatgtgaaacatcaacggtgacggttgtcgttttagaggggcttcccgaggtgttttgtttcggagcggattttcaagaaatctatcaggaaatgaaaaggggcagaaaacaggcaagctcccaagagcctctctatgatttgtggatgaaattgcagaccggcccttatgtcacgatttcgcatgtcaggggaaaagtgaatgccggcggtcttggatttgtatctgccacagatattgccattgctgatcagacggcgtcattcagtctctctgagctgctattcggcctgtaccctgcttgtgttttaccgtttctgatccgccgtatcggccggcagaaagcgcattatatgacgcttatgacaaagccgatttccgttcaggaagccagtgaatgggggttaatagatgcttttgatgctgaaagtgacgtgctgctgagaaagcatttattgcgtttgcggaggctgaataaaaaaggaatcgcacattataaacagtttgtgagctcacttgatcatcaagtcagtcgtgcgaaagccaccgctttaactgcaaatcaagacatgttttctgatcctcaaaaccaaatgggaatcatcaggtatgttgaaacaggacaattcccatgggaggatcagtaaccgtttaaaaatgacaatcagaaccgttaggaggacatcatgacgcattctgttgtagagcttatcgaaattgaatccgccattattcaggtaaagatgcaagatcgcactcataaaaacgcgttttcacaagaacttacagacggtttaattcaagcgtttgaatacatacggcagaaccccaaatacaaagcggtcattttgacaggatatgataattattttgcttcaggaggaacgcaagaaggactgcttcgaattcaacagggattgaccaagttcactgatgacaatctttattctctggcgctggattgtgagattccagttattgcggcaatgcagggccatggaattggaggcggctttgtcatggggctctttgctgacatagtcattctgagcagagaaagcgtgtatacggctaattttatgaaatacggatttacgcctggaatgggcgctacctttatcgttcctaaaaaactgggtttcagcctgtcccaggaaatattattgaatgcgggcagctaccgcggagctgatcttgaaaaaagaggggttccttttaaggtgctgccccgtgcagaagtgttagattatgcagtggagctggcgcaagaactggcggaaaagccgagaaactcactggttacactgaaagatcatttggttgccccgcttcgcgatcagctgccgcgcgtcattgaacaggaattgatgatgcatgagaaaacatttcatcatgaagaagtcaaaagtagaatcaaaggtttatatggtaattaactgaaaatatataaaattttgcaggtgaaatggaggcagcgtgatgagaaataatgataatatccgcattttagctaatccttctgtcagtcatggtgagcctttacatatatctgaaaagcagccggcaacaatacctgaagttttatacagaacggcggcggagcttggggatacaaagggaatcatttatttgcagccggatggaactgaagtttaccaatcatacagacgattatgggatgatggactgcgcattgcaaaagggcttcgccaatcaggcctgaaagcaaaacaaaacgtgattttgcagcttggtgacaattcacagcttctccctgcgttctgggggtgtgtgttaacaggggttgttccggctccattagccgttccgccaacgtatgctgaatcgagcagcggcactcaaaagctgaaagacgcatggacgcttcttgataagccagcggtgattacggaccgggggatgcatcaggaaatgctcgattgggcaaaagaacaagggcttgaagggttcagggcaattattgtagaggatctgctcagcgctgaagcggacacagattggcatcaatccagtcctgaagacttagcgcttttattgctgacttcaggcagtacgggaacgcccaaagcagttatgcttaatcatcgtaacattatgagcatggtgaaagggattattcaaatgcaaggcttcaccagagaggatattacgtttaactggatgccgtttgaccatgtcggagggatcggaatgctgcatttgcgggatgtttatcttggctgtcaggaaattaacgtctcaagcgaaacgatcttaatggagccgttgaaatggctggattggattgatcattaccgagcttctgttacgtgggcgccgaattttgcgtttggtctggttactgattttgcagaagaaataaaagataggaaatgggatctgtcttcaatgcgatacatgctcaatggcggtgaagcaatggtagccaaggtagggcgcagaatacttgagcttttagaaccacatggactgcctgctgacgccatccgacctgcctggggaatgtccgaaacttcatcgggcgttattttttctcatgaatttacccgggctggaacaagtgatgatgatcattttgttgaaataggctctccaatccccggcttctctatgagaattgtgaatgaccataatgaattggttgaagagggtgagatcggccgttttcaagtctcgggtctttctgttactagcggttattaccagcggcctgatttgaatgagagtgtgtttacagaagacggctggtttgaaaccggagatcttggctttttgcgaaacgggcgcttaaccataacaggccgtacgaaagatgcaattatcattaacggcattaattattacagtcatgcaattgagtctgcagttgaagaattatctgaaattgaaacttcttatactgctgcttgcgctgtccgtctgggccagaattcaacagatcagctggctatcttctttgttacttccgcaaaattaaatgatgagcagatgtctcagcttcttagaaacatacaatcccatgtctcacaggtgatcggagtcaccccggaatatttgctgcctgtacaaaaagaagagattccaaaaacggctatcggaaagatccagcgcacccagctaaaaacttcatttgaaaatggagagttcgaccacttgctacataaacccaatcggatgaacgatgcggtccaggatgaggagatacagcaagcagaccatgtgaaaagagtaagggaagaaatacagaagcatctgctcacctgtttgactgaggagctgcatgtttcccgcgattgggtggagccaaatgcaaatatccaaagtcttggtgtgaattctatcaagatgatgaagctcattcgatcgatcgagaaaaactaccatatcaaactaacagccagagagatacatcaatatcctacaattgaacgcttagccagctatctatcagaacatgatgacctcagcagtttgtctgctgacaaaaagggcacggacacatataaaaccgaaccggaaaggagtcaggcaacttttcagcctctctctgaggttcaaaaaggattatggacattgcaaaaaatgtcacccgaaaaaagtgcatatcacgtacctctctgttttaaattttcgtcagggcttcaccatgaaacattccagcaggcttttggccttgtattgaatcagtacccaatcttaaagcacgtcatccaagagaaagatggagtgccatttcttaaaaatgagccggcactttcaattgaaatcaagacagaaaatatctcaagtttgaaagagtctgatattcctgcttttcttagaaagaaagtaaaggaaccgtatgtaaaggaaaacagcccgttagtgcgtgtcatgagcttttccagatctgaacaagagcattttttattagttgtcattcaccatttgatttttgacggagtttcgtctgtcacatttatacgcagtctgtttgatacctatcagcttcttttaaaaggacagcagccggaaaaagctgtttctcctgccatttatcatgattttgcggcatgggagaaaaacatgcttgccggcaaagacggtgtgaagcaccgtacatactggcagaaacagctatcgggaactttgccgaatcttcagctgcctaatgtcagcgcaagttcagtcgattctcagtttagagaggatacatacagcaggcggctgtccagcggcttcatgaatcaggtcagaacgtttgcgaaagagcattctgtaaatgtcacgacggtattcttaagctgctatatgatgctgcttggccgttacaccggccaaaaggaacagatcgtcggcatgccggccatggtgaggccggaagaaagatttgatgatgccattggacattttctcaatatgctcccgattcggagtgagctgaacccggcagacactttttctagctttatttcaaaattgcaattaacgatattagatgggcttgatcatgcagcatatccttttccaaaaatggtgagggatctgaatattcctcgcagtcaagcaggttcaccggtatttcaaaccgcttttttctatcagaattttcttcaatccggaagctatcaaagcttgctgagccgctatgctgacttcttttctgtcgatttcgttgagtatattcaccaagagggcgaatacgaattagtatttgaactgtgggaaacagaagaaaaaatggagctgaacatcaagtacaatactgggctgtttgatgcggcttctatatccgccatgttcgaccattttgtttatgtaacagagcaggcgatgttgaatccatctcagcctttaaaagagtattctttattacctgaggcagagaagcagatgattctcaaaacatggaacgccacaggaaaaacgtatccatatataacttttcatgagttgtttgagcagcaggcgaaaaagacgcctgatagagcggctgtcagctatgaaggtcaaacattgacgtatcgggagcttgatgagaaaagcacacagctggccatttatttgcaggcgcatggagtgggtcctgaccgtctggcggggatctatgtggatcgatcgctggacatgctagtgggtttattagcgatcctcaaggctgggggagcgtatgtgccgctagacccgtcctatccggctgaacgattagaatacatgcttgaggacagtgaagttttcattacactgacgacatcggaattagtaaatacgttgagttggaacggtgtcacaacagctcttttagatcaagattgggatgaaattgctcaaacagcctctgatcgaaaagtgcttacacgcactgtcacgccggagaacttggcatatgtcatttatacatccggcagcacaggaaagccaaaaggtgtcatgataccgcataaagctttgacaaactttctcgtttcgatgggggaaacaccaggtcttacggcagaggataaaatgcttgctgtcacaacctactgttttgatattgcagctctggaattatttttgcctttaataaagggcgcacactgctatatttgtcaaacggagcatacaaaagacgttgaaaaactgaaacgggacatccgcgcgatcaaaccgacagtgatgcaggcaacccccgctacgtggaagatgctcttttattcaggctgggaaaatgaagagagcgtgaaaattttatgcggtggcgaagcatttcctgagacattaaaacgatatttcttagatacgggcagtgaagcctggaatatgttcgggccaaccgaaacaactatctggtcagcggttcagcgcattagcgatgaatgctctcatgccacgataggaaggccaatcgccaatacacaaatctatattacggattctcagctcgcgccagtgccggcaggtgtcccgggtgagctgtgcattgcaggagacggtgtggcgaagggctactacaaaaaggaagaattaacggattcgagattcattgacaacccttttgagcctgggtctaagctttatagaacgggagacatggcccgctggcttccgggagggcgaattgaatatataggccgcatcgataatcaagtaaaaatccgcggattccgtattgaacttggtgatattgaaagcaggcttagtgagcatcccggcattctggaatgcgttgtggtcgcagatatggataacctagctgcctattatacagctaaacatgcaaatgcttctctcacagcgagagagctgcgtcattttgtgaaaaacgctttgcctgcctatatggtgccttcttattttattcagcttgatcatatgccgttaactccgaacggaaagatagatagaaacagccttaagaatatcgatttatcaggggagcagctaaagcaaaggcagacctctcctaagaacattcaggatactgtttttaccatttggcaggaagtgctgaaaacgagtgacattgaatgggatgacggatttttcgatgtgggcggggattcgcttctcgcggtcactgtggctgatcgcatcaaacatgaactatcctgtgagttttctgtcacagacctgtttgagtattcaaccattaaaaatatcagccagtacatcactgaacagcgaatgggcgatgcaagtgaccatatgccgacagacccggcagctcatatagaagatcagtctaccgagatgagtgatctcccagactattatgacgatagtgtagcgattattggcatatcgtgtgaatttccaggggcaaaaaatcatgatgaattttgggagaacctcagagacggcaaggaaagcatagcgtttttcaataaagaagagcttcagcgctttggcatttcaaaggagatagcggagaatgccgactatgtcccggctaaagcttcaattgaggggaaagacagatttgatccaagcttctttcaaatctctcctaaagacgctgaatttatggaccctcagcttcggatgctgctgactcattcatggaaagcaatagaagatgccggttatgctgcgagacagattccgcaaaccagtgtttttatgtcggcaagcaataattcttatcgcgcgctgctgccgtcagatacaacagagagcctagagacgccggacggctatgtttcgtgggtgcttgcacagagtgggacgatcccgacaatgatttctcataagctcgggctgagagggccaagctatttcgttcatgccaactgctcatcatctctgattggattgcattctgcctataaaagcctcctgtcgggtgaatctgattatgctttagttggcggtgcaacgctgcataccgagtcaaatatcggatatgtgcatcagcctgggctgaacttttcgagtgatggacatattaaagcttttgacgcttcagctgacggaatgataggcggtgagggcgttgctgttgtattgctgaaaaaagcagctgatgctgtaaaggacggggatcatatctatgccttgctgagaggcattggtgtaaataacgacggcgctgacaaagtcggcttttatgctccaagcgttaaaggccaggctgacgtggtccaacaggtcatgaatcaaacgaagatacagcctgaatccatctgctatgtagaagcacacgggaccggaacgaagctgggggacccgatcgagctggcggctttaacaaacgtttacaggcaatatacaaataaaacgcaattttgcggcattgggtcggtgaaaaccaatatcggacatttagatacagccgccggtcttgcgggctgcattaaggttgtgatgagtctttatcatcaagagcttgcaccgagtatcaattataaggagccgaatccaaatacagacttagccagctctcctttttacgtcgtcgatcaaaagaaaacgttaagccgtgagatcaaaacgcacagggctgcacttagctcgttcgggcttggcgggacaaatacccatgccatttttgaacaattcaaaagggattcagataagggaaagatagacggaacctgcatcgtcccgatctcggcgaaaaataaagagaggctgcaagagtatgcagaagacattctggcctatttagaaagaagagggcttgagaacagccagctgcctgattttgcgtatacccttcaggtggggcgcgaagcgatggagcatcgcgttgtctttattgccgatcatgtaaatgagttaaaacagaggctcacagattttatcaatggtaaaacagcgattgaaggctgttttcaaggaagtaagcacaatgcaagagaggtttcatggctgacggaggatgaggacagcgctgaactcatacgtaagtggatggccaaaggaaaagtaaacaagcttgcagaaatgtggagcaagggagcgaatatagattggatgcagctttacaagggtgagcgcccaaacagaatgagtctgccgacttatccatttgcaaaggaacgatactggccgtcgcaggatgaccgcaaaccggtggcgcagatatccggaaatcagacagggatcggctctattcatccattgcttcatcagaatacatctgatttttctgaacagaaattcagttcggttttcactggtgacgaatttttcctgagagaccatgtggtaagaggaaagcctgtgcttcctggtgttgcgtaccttgaaatggcgtacgcggctataaaccaggcggcaggaagtgaaattggccaagatgtcagaatcagattgaatcatacagtctgggttcagcctgttgtggttgacagacattcagctcaagtggatatcagtctcttccctgaagaagatggaaaaatcacctttgacatttacagtacacaggaagacggggacgaccctgttattcatagtcaaggcagtgcggagctggcatctgccgccgaaacgccagtcgcagacctcactgaaatgtcacgccgctgcggcaaaggaaagatgtcgcctgatcaattttacgaagaaggcagaagcagaggaatgttccatggtccggcctttcaaggaattaagaatgtgaatataggaaacagagaggttttggcgcagctgcagcttccggaaatcgtttctggaacgaatgaacagtttgtgctgcacccaagtatcatggactccgccttgcagacagcaacaatatgcatcatgcaggaattgacggatcaaaagctgattttgccatttgcgcttgaggagcttgaggtgatcaaagggtgttcttcttctatgtgggcttatgctcgcttaagtgacagcgatcactccggaggggttgttcagaaagcggatatcgatgtcattgacgagagtggaagcgtatgtgtcaggatcaaaggattctcaacgagagtattagaaggggaggttcatacttcaaagccttcaacacggtacgaacgcttaatgcttgaaccggtgtgggaaaaacagaatgaagaacgagaggacgaagatccttcgtacacggagcatatcattgttctcttcgaaactgaacgaagtgtcacagacagcattgcctcccacatgaaagatgtccgtgtgattactctaaacgaagctgaaggacatattgctgaacgttatcaatgttacatgcagaacatttttgaactcctgcaaagcaaggtccgtgaactttctgcaggccgtatcatcattcaagcgattgttccgctggaaaaagagaagcaattgtttgccggcgtttccggtctgtttaaaacagcagaaatagagttcagcaaactgactgctcaggtcatcgaaattgagaaacctgaagagatgatagaccttcacctcaagctgaaagacgacagccagagaccatttgacaaacagattcgatatgaggctggacaccgttttgtgaaaggctggagggaaatggtgcttccttcagctgatatgcttcacatgccgtggagagacgaaggcgtttatctaatcacaggcggagcaggaagcttaggccttctgtttgcaaaggaaattgccaatcgaactggccggtctactattgtgctgacgggacgatctgttttaagtgaggataaggaaaacgagctggaggctcttcgaagcatcggagcggaggttgtctatcgggaggctgatgtaagtgatcagcatgcggttcgtcatcttttggaggaaatcaaagaaagatatggcactctcaatggaattattcacggtgcaggcagcattaaagatcgcttcatcattcataaaacgaatgaagagtttcaagaagtgttgcagccaaaagtgagcgggttgttacatgtagacgaatgcagcaaggatttcccattggactttttcattttcttctcttctctttcgggatgtttaggaaacgctggacaagccgattatgcggcagccaattcgtttatggatgcatttgctgaataccgccgttctcttgcggcatcaaaaaagagattcggctccaccatttccttcaattggccgttatgggaagaaggcggtatgcaagtcggcgctgaagatgaaaagagaatgctgaaaacgacgggaatggtcccgatgccgacagatagtggcttgaaagcattttatcaagggatagtatctgataagccgcaagtttttgtgatggaaggacagcttcagaaaatgaagcaaaaactgctttccgcaggatcgaaagccaagcggaacgatcagagaaaggcggatcaggatcaaggacaaactagaaaattggaagcagccttaatccaaatgattggcgcaattttgaaagtaaacactgacgatatcgatgtcaacacagagctgagtgagtacggattcgactcagttacattcactgtctttacaaacaagatcaacgaaaaatttcagttggagctaacaccgaccattttctttgaatatggtagcgtccaaagcctggctgaatatgtagttgctgcgtatcagggcgaatggaatcaagatgctactgctaaaggcaaagatgaaagaacaaacttagtgcacagtttaagcagcctggaggcatcattaagcaacatggtcagtgcaattttaaaagtaaatagtgaagatattgatgtcaatacagagctgagtgaatacggatttgattccgttacatttacggtctttacaaacaagattaacgaagaatttcagttggagctaacgccgaccattttctttgaatatggaagtatccaaagcctggctgagtatttgactgctgaacatgaggacaccctggttcaggagcgcgaaaaaccagaggggcaggaagagttacagacaaaatcccctgaagcgccgaaaatcacatcacgtagaaagcgccgctttacacagcctgttattgcaaaagcagaaagaaacaaaaagcaggctgccgattttgagccggttgcaatagtcggcatcagcggccgattccctggcgctatggatatagatgaattttgggaaaacctagaagaagggaaagacagcatcacagaagttccaaaagatcgatgggattggcgggagcattatggaaacccagacactgacgtcaataaaaccgacatcaaatggggcggatttattgacggtgtcgctgagtttgatccgttgttttttggtatttcgccgcgagaagctgattatgtagaccctcagcagcgcttgttaatgacatacgtgtggaaggcactggaagatgcgggttgctcgccgcaaagcctttcgggtacagggaccggtatctttatcggtacgggaaacaccggttataaagatctattccatagagcgaatcttccaattgaaggccatgctgctacaggtcatatgattccttcggtaggcccgaatagaatgagttattttttaaatattcatggtccgagcgaaccagtagagacggcctgttccagttctcttgtagccattcaccgtgctgtgactgcgatgcaaaacggtgattgtgagatggcgatcgctggaggcgtgaatacgatcttaaccgaggaggcgcatattagctacagcaaggcgggtatgctcagcaaagacggcaggtgtaaaaccttctccgccgatgcgaatggctatgccagaggcgaaggggtcggaatggtcatgttgaaaaagctggaagatgccgagcgcgacggaaatcatatttatggcgttattcggggcacggcggaaaatcacggcggaagagccaataccctgacatcgcctaatccgaaagcacaagctgatttgttggtgcgtgcatatcgccaagcaggcatagatccaagcactgtcacatatatcgaagcacatggaacagggacggaattgggcgatccgattgaaataaatgggctgaaagccgcgtttaaggaactatccaatatgaaaggcgagagccagccggatgttccggatcaccgttgcggcatcggctcagttaaaagcaatatcggtcatttagagctagcagccggtatttccggtttgatcaaagtgcttttgcaaatgaagcataaaacgttagtgaaaagcctgcattgcgagacgcttaatccttatcttcagctgacagacagtccgttttacatcgttcaggaaaaacaggaatggaagtctgtcacagatcgtgacggaaacgagcttccgcgccgtgccggaatcagttcgtttgggattggcggagtaaacgcgcatattgtggttgaagaatatatgccaaaagccaattcagaacacacggctacaggacagccaaacgtgattgtgctgtcggctaaaaataaaagcaggctgatagatcgtgctttgcaattgcttgaggcgatccgcaataaaaaatatacagatcaggagttgcaccgcatcgcttacaccctgcaggtcgggcgcgaagaaatggatgagcgtctggcgtgtgttgcggggacaatgcaggaacttgaagagaaactgcaggcgtttgttgacggtaaggaagaaacaggcgaatttttccggggacagtctcatcgaaataaagagacccagactatatttacagcagatgaagatatagcgttggcacttgatgcttggatcagaaaaagaaaatacgccaaacttgctgatttatgggtcaaaggggtctcaatccagtggaacacattatacggagagaccaaaccgcgcctgatcagcctcccttcatatccgtttgcgaaggatcactattgggtgccgacaaaggaacattcagaaagagacaaaaaagaactggttaatgcgattgaagatcgggctgcatgctttttgacgaaacaatggagtttgagtccaattggctcagcagtgccggggacaagaactgttgccatcctgagcaatcaagagacagcagatttagcagcagaagtgtcttcgtattttccgaatcatctcttattagatgtgagccggatagaaaatgatcagtcagacattgattggaaagagtttgacggcctagtggatgtcatcggatgcggtaaggatgatgagggccggctggattggattgaatgggtgcaaagactggttgaattcgggcataaagaggggctcaggctgctttgtgtgacgaaggggctcgaatcgtttcaaaacacatctatccggatggctggcgcctcacgggctgggttgtatcgaatgctccaatgcgagtacagccatcttatatcaaggcatatggatgcagaggaggttactgatcatcgccgtctcgcgaagttgatcgctgatgagttttattccgattcttatgatgcggaggtttgctacagggatggtttacggtatcaagcttttctaaaagctcatccggaaacaggtaaggccacggaacagagcgcggtcttcccgaaagatcatgtgcttctcattacaggcggcacacgaggcatcggactattatgcgcccgtcattttgcagagtgctatggagtgaaaaaactggtgctgaccggacgagaacagtttcctccgcgagaggaatggactcgttttgacacctcgaacacatcagttgcccagaaaatccaggcagtgcgggagctggaagcgaagggtgtacaggtggagatgctgccgctgacgttatctgatgatgctcaggttgagcaaacgttgcaacatatcaagcgaacattaggaccgattggcggtgtcattcattgtgcaggtctgacggatatggatacgctggcatttatccgaaaaacttcagatgatattcagcgggtgctggaacctaaggtgtcaggtcttacaacgttatatcgccatgtgtgtaacgagcctttacagttttttgtcttattttcttctgtttcagccattattccggagctttcggcgggacaagctgactatgctatggccaatagctatatggattattttgcagaagcacatcagaaacatgcgccgatcatcagtgttcagtggccgaactggaaagaaaccggtatgggtgaagtgacaaatcaagcgtatcgggaaagcggcttgttgagcattacgaattcagaaggcttacgttttctagatcaaattttatcgaaaatgttcggaccggttgttctccctgcgatggcgaatcaaacaaactgggagccggaactgctgatgaagaggaggaaaccgcatgagggcggtttgcaggaagctgctttacagagcccgccagctagagacattgaagaggccgatgaagtttccaaatgtgatgggttattatctgaaacacagtcctggcttgttgatctgtttaccgaagagctgagaatagatcgtgaagacttcgagattgacggggtgtttcaggattatggcgtggattcgatcattttggcacaagtgctccagcgtataaaccgcaaattagaagcagcactcgatccatcgattctatatgaatacccgacaattcaaaggttcgcagattggctgatcggttcttattccgaaaggctgtccgctttattcggaggcaggatatcggatgcatcagcacctttggagaacataatattggcggaggcagctgttcctgcggaggatcgagctcttacacctcagattcaggcgccagcgattttgtcaccggactctcatgcagaaggtattgccgttgtcggactctcttgccgattccctggggcagatacattggagtcatattggtcgttactatccgaggggcgttcgtcaatcggcccgattccggcagagcgttggggctgtaagacgccatattatgccggcgtgattgatgacgtcagctattttgatcctgatttctttttgcttcatgaagaagacgtaagggcgatggatccgcaagcactgctcgtattggaagagtgtctgaaactcttgtatcacgccggttatacgcctgaggaaataaagggaaagcctgtcggtgtttatatcggaggcagaagccagcacgaacctgatgaagagagccttgatcatgccaagaatccgatcgtgacagtcggccaaaattatttagcggctaatctttcacaattttttgatgtccgcggcccgagtgttgtagttgacaccgcatgctcgtcagctttggtcggcatgaatatggccattcaggcgctgcgtggcggagatattcaatccgccatagtcggcggtgtcagcttgctgagctcagatgcctctcacaggctgtttgaccggcgcggcattttaagcaagcattcatccttccatgtgtttgatgagcgtgctgacggagttgtgttaggtgaaggcgtcggaatggtcatgctaaaaacggtaaaacaggcgctggaagacggagataccatatatgctgttgtgaaagcggcctcggtcaataatgacggaagaacggcggggcctgcaacacctaatctggaggcgcaaaaggaagtcatgaaagatgcgctttccaaaagcggaaaaaaaccagaggacatcagctatcttgaggcaaacgggtcaggttcaatcgtaaccgatctccttgagctaaaagcgatccaatcagtgtaccgttctgggcactcatcgcctctttctcttggctcaatcaagccgaacatcgggcatccgctatgtgctgaagggatcgccagcttcattaaggttgtgctgatgctgaaagagcgccgctttgtcccatttttatcaggtgaaaaagagatggcgcatttcgatcaacagaaagcgaacatcacgttcagccgagccctggaaaaatggacagattcgcagcctactgcggctattaactgctttgccgatggggggacgaatgcccatgtcatcgtagaggcgtgggaaaaagatgaaaaacacgccatcaagcgcagtccaatatcgcctcctcaattaaagaaacgaatgctttcgccaggcgagacaaagctggaagcggagacttcgaaaatgactgcggcaaacatatgggatacttatgaggtggaggtctaacgtgaaaaagataacgaaacaactcacattatcgttaaaaaatccgtttatttatcaccatgtggtttacggacaaaatgtcctgccgggattggcttatatcgatataatctaccagatattcagagaacacggcttctcctgctcagagcttcagctgcggaatttatccatctatcagccattgacggcggaacaggatgcagtaattgttctgaatatccaatgcgcggagaaaaaagaaggacagtggcaaatcacagccaagggaactgaaaaacgtgatgggaaagaagcttcagaagaaaagctctatatgaaggctgatatgtacgcagactccccagccatatttgaagaaacactggatctcagtcaaatcaaagcatctgcacagaacgttgttcagcttgatgatgtatatgaacaatgcagacgtcaggaattggtgcacagcgaatatatgaaagcaaaaggctgcatctatgaagaggaagatggcgtccttcttgagctttctctcggttcggaagccatgcttcacgcagaaggctttatgtttcacccgactctcatagacgggagcggggtgggtgccaatcatttgctcacatctttgcttaaaggagaacagaggctgtatttgcctctgttctatgaatccttttccgcttctgcacttttgcagtcgaattgcatgacgagaattaagcgctcctccgtccggcgggaaaaagagctgatttatgtaacacttgaattttttaatgcgtcgggagaaaaagtggctgagttgaaaaactttacaagcaaattggtgcgagaagcggagctgattagcggaaaacatcaagatgcacaggagacacagatgacaagagcggacactgctgagcgtgataaacctgctgacatggtatcttctcccgttaattcctatagtgaggctgaacagttcgtaagccaattaatcgcagagaaaatcaataagccggtagaacaagttgaaaaacaggtcggttattaccaaatgggactgaattcatcgggcttgcttgaggtggtagaaacgatcagtgataagatcggtgagagcctttcgccgactcttctgtttgagcataccaccatagcggaactgtcagcgtttcttgccgaggaatatgctgagcattttagtgccgctggttcccttggccttggccagaatgaaagagcacgcgtttccgacagcataaacgaccgtaagactgttgaagcttctcgtcctgcacctattgaggcagcaggcgatattgcgattatcggcttggcgggcaggtatccgaaggcagccaatattcatgaattttggaacaatctgaaagaggggaaggactgcgttagcgagattcctgagtcgcgctgggattggcagaaacttgaaggaatcacatctccttcgggtaaggacatttccaaatggggaggatttattgatgatcccgactgctttgatccccaatttttcagaatcacgccaagagaagcggagacaatggaccctcaagagcggctgtttttagaaacatgctgggaaacgattgaggatgcgggctatacgccaaagacgttggccaagcctaaaggacgaaataaaaggcagcatgtaggagtttttgccggtgtcatgcacaaggattatacattagtcggagctgaagaagcatcagcagaaaatgtgtttcctctttcgctcaactatgcgcaaatcgccaaccgtgtttcttacttttgtaatttccacggtccaagtatggctgtcgatacggtatgttcatcctctttgaccgcagtgcacttggcgttggaaagcatacgtcacggtgagtgcgatgttgcgttagcaggcggagtgaacctgtctttgcacccgaataaatatatgacatacggggtctgggatatgttttccactgacggacactgccgtacgtttggaaaggatggagacggttatgtgcctgcagagggtataggcgcggttttattaaagcctttgcgccaggcagaggaagacggagatcgcatttatgcagttattaaaggaagtgctgtgaatcatgtgggcactgtaagcggcatttcagtgccgagccctgtttcccaagctgatctgattgagacatgcttggagaaaacgggaatcgatccgcggacgatcagttatgtggaagcccatggaaccggcacgtccttaggagatccgatcgaaatacagggattagtgaaagcgttccgccaatatacgcaggatcggcagttctgttcaatcggttctgtaaagtcaaacattgggcacgccgaatccgccgcggggatcagcggtttaagcaaggttgctcttcagcttcaccatcaaaaacttgtgccttctttgcattcggaagaactgaatccgtacgttgattttgaaaagtctccattttatgtacagcatgaaacagaaacgtggaagcagcctgttatcaaggagaatggggaagacgtcccttatccgcgacgggcggggatcagttcttttggcgcaacaggttcaaacgcacatattatccttgaggaacatattcctcaagcagcggagcaggacgtttctttgtcctcagattctgacatatccgcagttattccgctttctgcccgtaatcaagaacgtctccgtgtatatgcaaaacgtctcttggattttcttcatgatgggattcagattagagatttggcgtatacattgcaggtaggccgtgaaccgatggaagaacgggtttctttcttagcatccggaattcaagaattgagcgaccaattgaaggcttttatagaaggacgaaaagccattcagcattgctggaagggccgcgtgtcaagaggaagcgaaccatcgcgtcccgccgaatcggtacataaattgctggagcaaagaaaactcgatcagattgcggagcagtgggcgaacggatctggtgttgactggaagctgctttacgagggaagcaaaccaaagcggatcagcctgccgacttacccatttgagagggtgcgttattgggtgccgaaagcggagaaaaagactgatcgttcaaaacaggagcggcacatcctgcatcctcttctgcatcaaaatgtgtccgacatatcgggtgtccgcttccgttcagcgtttacaggacgtgaatttttcttgaaggatcatgtcataaagggcgaacacgttttacctggcgcagctttattggagatggttcgggcagctgtggaaagggcagctgcggatcagttcccgacaggattccggctccggaatatcgtctgggtccggccgttcgccgtcacggaacagcagaaagatatagatgtacgtctatatcctgaggaaaatggtgagattacatttgaaatctgccgggaccctgaaagcgcagaggagtcgccgattgtatatgggcaagggagtgcagtgctttgtgaggctggtgaaaatccggttatcaacattgaagaattgaaggcaagctataatggccggacgctgtcaccttttgattgctacgaggcttatacagaaatgggtattcattatggtgacagccacagagcgatcgacagcctatatgccggcgaaaacggagttctagtgaaattgacgatgcctcctgtaatctctgatacagaagaccattatattctgcatccgagcatgatagattcggcatttcaagcatctatcggtttgaggctgggaggagctacgagtttagaagacagaaaggcaatgctgccttttgccatacaggatgtccaaatcttcaaaggctgcgaggcatctatgtgggcgcggatcacatatagcgagggcagtacagctggggatcgtatgcagaagcttgatatcgatttatgcaatgaagaggggcaggtttgcgtgcgattgacgggctattctgcaagagtgttagaaacaggtcaagaagatccttctgaagcgactgacacgctattgttcgaacatatttgggaagaacgtgctgcagagaggaaagagctcatagagtacgacacacataaagtcgttatctgtgatgttggagaacaaatggaaagcctccaaaatcatcttgactgtacagttctgcagcatgatacagagacaattgatgaacggtttgaaggttatgccatacagttatttgaagaaatcaaacagctaatgcactcaaaaacagggggacatacattcattcaagtggcggtgcctgcgttggacgagcctcagctattaagcggcttaactggattgctcaaaacggctgaactggaaaatccaaaactgacaggacagttgatcgaaatagagaccgggatgtcagctggtgacctattcgaaatattggaggaaaacagacgctatccgcgtgacacgcatatccgtcactggcaagggaagcgatttgtaagcaagtggaaagaagtgtctggtgagcacctaagagctgatatgccatggaaggataaaggcgtgtatctgatcacaggcggtgcaggcggtcttggattcatctttgcaactgaaattgcgaaccaaacgaatgacgcggttgtgatcctgacaggacgctctccgcttgatgaaaggaagaagaagaagcttcaagccttacagaaacttggcatccaagcgatttacagacaagctgatctggctgacaaacaagcggttgatgccttattaaaagaaacccaaaacgtttacggagacttagatggcatcattcatagcgccggtttaataaaagataatttcattatgaagaaaaagaaagaagaggttcaaaccgttcttgctccaaaggtcacaggactggttcaccttgacgaagcaacgaaagatattccgctcgatttctttatccttttttcctcaggtgccggagcagtaggaagcgcgggacaggctgattacgcaatggccaatgcatttatgaatgcatttagcgaatatcgtaatggccaagcagagctgcacaagcgttacggaaaaactctttcagtgtgctggccgctgtggaaagacgggggcatgcaaattgatgcggaaactgcaaggatgctgaaaagagaaacaggcatggtggccatggaaacagatcgtgggattcaggcgctatatcatggctggacgtcagggaacccgcaagtgttagttgcttccggtgttactgatcggattcgtgcatttttacatgaaacgggacatggcaaaggccaatctcacaatatcaaaaaaagcagtctcaatcaggaggcagaaaaagcagacatcattggggaaattgatgaagagatactaagagaaaaagcggagaactattttaaacaggtgctttcttcggtgattaagctgccagctggccagattgatgctgaagctcctctcgaggattacgggatcgattctatcatgatcatgcatgtaacgggtcaattagaaaaagtattcggatctttgtccaagacgctgttctttgaataccaggatattcggtcattaacccggtattttattgattcccgcagagaaaaactgctggacatcttgggatttgaaacgggaaaaccttctgttgaaagaaaatcagaacctgaaaaacaagaaatcccagttatcccaagaaagtctggatttcttcctttgcaagataaagagcagaagcaggtaagagagaaggaaacggaagaaattgcgatcatcggtatctcaggtcgctatccgcaggcagacaacattgatgaattatgggaaaacctgagggacgggcgagactgtattacggaaattcctgcagaccgctgggatcacagtctttattatgacgaagataaagacaagcctggaaaaacctacagcaagtggggcggcttcatgaaggatgtagacaagtttgacccgcagtttttccatatttcgccgcgtgaggcaaaattaatggacccgcaagagcgtttatttttgcagtgcgtgtatgaaacgatggaagacgcaggctatacaagggagcatctcggccgtaagcgtgattcggagcttggcggaagcgtcggtgtttacgtcggtgtcatgtacgaagaatatcagctgtacggggcacaagagcaggtgcggggaaggtctctggctttaacgggaaatccatcatccatcgcgaaccgagtatcttattattttgattttcacggaccgagtattgctttagacaccatgtgttcttcttctttaacggctatccacttggcctgccaaagcctgcagcgcggagagtgtgaggcggcattcgcgggcggcgtgaatgtgtcaatccatccaaataaatatttgatgctcgggcagaacaaatttatgtccagcaaaggccgatgtgaaagcttcggacagggcggagacggctatgtgccgggggaaggcgttggagcagtgcttctgaagccattgtctaaagcagttgaagatggtgatcacatttatggaatcattaaggggacagccattaaccacgggggaaaaacaaacgggtactcagttcccaatccgaatgcccaagcagatgtcatcaaaaaggcgtttgtggaagcgaaggttgacccgtgggcagtcagttacatcgaagcccacggcacgggaacctctctcggtgatcctattgaaatcacagggctgtccaaagtgtttacgcaagaaaccgatgacaaacaattttgtgcaatagggtcagccaaatcaaatatcgggcactgtgagagtgcggcaggtatcgcaggagtaacgaaggtattgctccaaatgaaatacaggcagcttgcgccttccctgcattcaaacgtgctgaacccgaatattgatttccttaactcgccgtttaaagtacagcaagagctagaagagtggaagaggccgatcatcagtgtcaatggcaaagacatcgaattaccgagaatcgcaggagtctcttcatttggtgccgggggtgtgaacgcccatattttaatagaagagtatgattcggaacctgtggaggagcgtttaccagcgaggaaacagccggctgtcattgtgctctcagcaaaaaatgaggaaagacttcagaaacgcgcggagcgattgctgcataccattcgtgaacaaacatatgttgaagcagatttacaccgaattgcctatacgcttcaagtcggacgggaagcgatgaacgaacggctggcgttcgttgcggaatcgatgcgggagcttgaagaaaagctgaatgaatgtatctccggaacagaaaatcgtgaatatgtctatcgcggacaagtaaagcgcaacaaagaagccattgctgcttttgctgctgatgaggatatgtcaaaaacaattgaggcatggctgcaaaaaggcaaatatgcgaaggttttagacctatgggtaagaggtttgcgcatcgactggagcacgctatatcaggatcaaaaaccgcagcgcatcagtttacctgtctatcctttcgcaagagatcgctattggatagacgtacatgcaatggctgaggaaaaaagaacggaggagccattcgctccggtacagcccgtccttccaaagccgtctgtagccagagaagccagcggcaagcctgccaatattacgttacagcctttaatgaccaatcaggatcgtttagagcgttttccatcagatacagaaacagagacgatcacggcggaagccttgtgcgatgaactgacagcgggcttagcggaagtgctgtacatggaccaaaacgagattgatccagacgaagctttcatagatatcggtatggactcgattaccgggctcgaatggataaaagcaataaataaacagtatggcacatcactaaatgtcacaaaggtatatgattatccgacaacacgtgatttcgctgtttacttagcacacgagttaagcacacaggctggggagaaaaaacaaacggagacgtacacgccgatcagacaaaaaacagcggtacctgctgctaaaccggctaatatatctctgcagccgttagaacatcatcagccagtgcaagaggagggtgaagaaacgattcaatatgcagcggcagaaatatctgcatcaagacaatatactgtagcaattgaaacgctgcatgaaaacttgagggaaagcatagcagacgtgttatacatggagccatacgaggtggatattgacgaagcgttcatagatatcggaatggactcgattaccggactcgaatggataaaagcggtgaacaagcaatacggaacgtcttttacggtaaccagggtatatgattatccaacgatacgtgattttgccgaaatgctaaagtccgagcttggaactcatcatgatagagaggtagagcatactgttcctatcgaagcagtccagcaaaagccagcagcaccatctaatccaaagccggcagaacggccccttcagcctgttcaacatccaataaagaaagaacatgagaagaaaacggtacctgttcatcaagactacccggaggatgcgatagcgattgtcgggatgtcgggaagatacccgggcgctcgtaatgtaagagagtactgggataacctggttcatgcgagaaatgctattcgggacattccaacatcacggtgggatgttgacaaatactatgatcctgtcctcaacaaaaaaggaaaagtctattgcaaatcaatggggatgcttgatgatattgaacattttgatccgttgttttttaatattccgccgtcagaagctgaactgatggacccgcagcatcgaatctttttgcaggaaggctataaagcctttgaggacgctgggtacaacgcccgaactttaaatgagaaaaaatgcggtgtatatctcggcattatgagcaatgaatacggggtcatgctgaaccggcaggcaagagcaaatgccaccgggaacagctttgcgatcgctgcggcgcgtattccatattttcttaatttaaaagggcctgcgattcctattgacaccgcttgttcatcttcattggtcggcacacatttagcgcggcaggcacttataaacaaagaaattgatatggcgctggtcggcggggtcagcttatacctgacgccggaatcttacatcagtatgtgtgaggccggcatgctttcacctgatggacaatgtaaagcatttgacaatggcgcgaatggttttgtgcccggcgagggtgcgggtgcgctggttctgaaaaggctgaaagatgcagaagcggaccgtgaccatatttatggcatcatcattggctcgggtattaatcaggacgggaaaacaaacggaatcacggcaccgagtgcaaaaagccaaatggacctggaaagagacatatatgaaacatacggcatacatcctgagagtatcagttatgtcgagatgcatggcacaggaacaaaacaaggcgatccaattgaattagaagctctgtccaccgtatttcaagaaaaaacagacaaaaagcagttttgcgcaatcggttccgtcaaaagcaatattggccatacatccgcggcggcaggagtagccggggttcaaaaagtgttattatgtatgaatcataaaacacttgtgccgacattgaacttcacgacaccgaatgagcattttgaatttgagcattctcctttatacgtaaatacggagcttaagccttgggaaacgggtgatggaaaaccgcggagagcatgtgtgagctctttcggatatagcggaacgaatgcccatatcgtgatagaggaatatcagcctgaaaagaggagcgatccattaacaaagcagcaccgctcagcattatttgtactttcagcgaaaaaagagaagcaattgaaggcctatgcggaagcaatgaaagatttcgtaacttccaatgaagatatcgatctggaggatatggcatacacacttcagacgggccgggaagcaatggattatcgcatggcgtttttggcggattcgagagaaatgctgatcaaagctttagatgattatttggctgaaatgccgaacggcagcatatttgctgctcacgtgaaaacgaagaagagcgaaatcaagctgtttgaaacggatcatgatgccaaagcattgctgcaaacatggatagagaaaaaaaggctggagaaagtagcagagctatgggtgaaagggctgcagatagattggaacaagctttatggggaatacacgcctcgccgaatcagcctgcctgcttatccgttcgcggaagagtattactggctgccaactcaagaaggcgaacccgaaaccattgctacagcaatgcctcaattcgaactgatgccaaagcgctgctttctgcgtaaacagtggcagccttgtccgattgaaccggcagaaatgacgaatcaaaccgtcgccattttggcaaatgaggagacaatggcattagcggaagagctttcgacgtatttctcgacataccgtatatttgacagccaagagctggatcgggtatctgctgctgactatgaacacgttgctggagcaatcgatctgatcgggtgcggaacgagccatgagcattctatgggctggataaactggctccaaaagctgatcgagcaaggacgtgcaagcaagcatcatttgacggtcttgggtgtaacaaaggggctggaggcctacgcaaatgagggtgttattttgtctggtgcttcacgggccggtttataccgcatgcttcaaagtgagtacagccatcttacttcaagacatgcagatatggaatgcgaagcctctcatgaggagctggccagactgattgcagttgaatattatgccaagagcacagaatcagaagtctgttatcgaaacggacagcgatatcgcgcatatttgacagagcagccagcagaagccgctctaagtcataagcaagtatcgttttcaacagacaaagtcctgctcattacaggcgggacaagaggtctcggcttgctgtgtgcgcggcattttgtgaaaacatacggcgttaagcggctggtccttatcggccgtgaagagcttccaccgcgtgaccagtggaatttggtaaaaatttcctcgcttgccgagaaaataaaagccgttcaagagctagaagacatgggtgcgcaagttcaggtgctgtctctggatctcacagacagggttgctgtcgaacagagcctgaagacaatacacgaaacaatgggggcgattggcggagtcatccattgtgccgggatggtgaacaaacaaaacccggcttttatcagaaaatcactagaagagatcggacaggtttttgaaccgaaagtcgaaggtctgcaaacgttgtttgacctgcttcaagatgaaccattggcgtttttcaccttgttttcatcagtatcagcggccatccctgcactagcagcaggacaagctgattacgcgatggcaaatgcttttatggattattttgcggaggctcatcaagataaatgtcccattgtaagcattcagtggcctaactggaaggagaccggtttaggcgaggttcgaagcaaagctttagaacaaactggattgatcagtttgacaaacgacgagggattacagctgcttgaccagattctatcagacagacagtatgctgtcgtgctgccggcagtaccagatacaaacgtttggaagccggataagctgatgcagccgtcattgcctgtcgaagctctctcgcatcctgagacgaaagagcaaaccggcactcgcaacctgttccctgaaacagtcgactggctcgtaactcttttttcagatgaactgaaaatagctgcagaagactttgaaacggatgaacctttccaagaatacggaatcgactcgattatattggcccagctggtacagcagatgaaccaacaattaaatggagatattgatccgtcaatcttgtttgaatacccgacaatagaatcctttgcacactggctcatttcgaaatatgacatatcagctgttttacagccatctgttcctgagaaacagacacctctcaagccgcaatcagcaatgaaacagaagctggtgccagaacagcggccgcaacagataagccatgaaaaaacggcacttcttgctgaggacatcgctatcatcggtcttagttgcaggttcccgggagcggaaaccctagaggaatactgggatttaatacgtgatggacggtctgcgattgcgcctgttccgcctgaacgattcgggaactccagctcgaattacgcgggcctcattgatgaaatgaaccgatttgatcatgatttcttcatgatgtccgaaagcgatgtcagagcgatggaccctcaagctttggctgtattggaggaaagcttgaagctatggtatcacgcgggttatacagagaaagaagtgaaaggcatgagggctggtgtttatataggaggccgcagccagcacaagcctgatccggccagtctttcaaaagcaaaaaatccgatagtcgctggtggacaaaactatttagcggctaacatctcacaattttttgacttgaagggaccgagtattgtcctggataccgcttgttcctctgcactggtggggctgaatatggccattcaggctctgcgaagcggagatattgaggcagcggttgtaggcggcgtcagtttgcttgatgctgatgcgcatcgaatgtttcatgagcgcggacttttatgtgacaaaccgtcattccatatttttgataagcgggcagacggtgtcattttaggagaaggcgtgggcatggttctcgtcaaaaccgtcagccaagcggttgaagacggagattccatatatgcagtcattaaagccgctgcgattaataatgacggaagaacggcaggcccatcatctccgaatctcgaggcacaaaaggacgtcatgctgtcagcgcttgaaaaaagcggcaaaaagactgaagagatcagctatctcgaagcgaacggatcggggtcggcagtaacagatttacttgaattaaaggcaatccagtccatttaccgttctgaatcaaaggctccgttagggctgggatcggtgaaacctaacatcggccatccattatgtgcagaggggattgcgagcctgattaaagtagctttaatgctgaagcatagacaattggttccgttcctgtcaggtaatgaaaatatgccgtattttgatatagaaaaaacagatttgtatttcagcagatcgcaagccgagtggaaggagacaacgccggctgcggcaattaattgttttgcagatggcggaacgaacgcccatctcattatagaagcctggaatgaatcggttgctcgtccaattagaagaaaacctctgcctttgccggaattaaataggcagcccgttttaatcaaaccatcagctcaaaacgtgcaggaaaaagtgcattcagacacaggggcttctaaagatatgttttggaaaactttcaaataagagaggagtgggaaaatgataactgaacaactgcacatttcattaaataatccaatcatgtccaaccacaaggtatatggacaagcgttattacccggccttgcttatatagatttgatctaccaagtattccaggaacatggttatgtataccaagagcttgaattaaaaaacctgaccattttttaccctttgatcgcagatgagtcatatgacattgccctgaccattcacgtgtctgaaagaaaggaagggacatggtccatcatcatcgacggacaaaaacagcatggagaatcactatctgacaagagacaatatgtgactgctgacatgcatcgtaaagagcaaaccgcttttgccgaatcaatagaccttaatcagtggaaaagtacagctgacaggattctgaatttagatgaaatctatgaacaatgccgatctcaagagttagtgcataccggcatgatgaaggcggaaggacagatttatgaagccaaagagggggctgtaattgatttagcagtcggacaggaagcattgcgtcattctgatgcttttctgtttcatccgacgcttattgacggcagcggcataggttcaagctgcctgatctcagatcaaacgatgtacctgccattgtattatgaatcgttttctgcttcagaacgattgcaaaaaggatgtacagcacggatcctctcctcatctgtgcgccaaaagaaagagctcacttatatgacgattgaatattttaattcatcaggacaaaaagtggccgagctgaaacaatttgcaggcaagtctgtacggaatatgtcagcctttcattctccaaaagaaattcaagaagaaagagctgctgtctctcagaacatcagtcaggactatcccgcatttgaaatgtatttgcgtcagctgcttgctaagcagcttgaaaggccggcagaacaaatggatatccacgctgggtactatgagcttggtctggattctccgtcattgcttaccgtggttcaggaaattggagataaggttggagcggatcttgctccgacactgctgtttgaatttacaacaattgcagaactagctgctcatcttgctgatcactattcaattggagaggcggacgatgctgtccgccaatctccttcaccaatgaaggattctcctgatggtgttacctcttcaccagagatcggggaggacattgccattatcggaatggcgggacgctatcctaaggcaaaaaacatacaggaattttgggaacatcttaaagcgggtaccgactgcatcacagagattccaaactcacgctgggagtggaaagaaaacaatggacaggattcacctgcaggcaagccactctcgaaatggggcgggtttatcgaggaggctgattgctttgatcctcaatttttcagaatctctccgcgtgaagcggaaatgatggaccctcaggaacggttatttttagagacatgctgggaagctattgaagatgcgggttatacaccagagacaattgcttcaccgcagggagaaaataaaagacagcatgtcggtgtgtttgccggcgtaatgcataaggactattcccttataggggctgaagctctatcagaacacaatccatttcctttatcgctgaattatgcgcaaatcgccaacagggtctcttactattgtaatttccacggcccaagcatggcggtggacacggtctgctcttcctcattaactgcggttcatctggcaatagagagcatccggaatggagaatgcgaggccgcgcttgccggaggcgtcaatttgtcattgcatccggctaaatatatcagctatggcagtgtaggaatgcactcaagtgacggctattgccatactttcggcaaagacggagatggctacgtatctggagaaggtgtcgggacagtattgctaaaaccgctgcgaaaagctgaacaggacggtgaccgaatctatgctgtcatcaaaggaagtgcgataaatcatgtaggaaaagtaagcggaattacagtaccgagcccggtagctcaagctgatgttatcgaagcgtgtctagaaaaaacaggaattgatccgcgcaccatcagctatgttgaagcccatggcactggcacctcattgggagatccgattgaaatacaggggttagtaaaagctttcagccgcaatacgcaggacaagcaattctgttcaatcggttctgttaaatcgaatattggccatgctgaagctgcagccggcattagcggcttaacgaagactgtcctgcagctgcatcataaaaccttggtgccgtcattacattcagaagagctgaatccttatttgaagcttgatcaaaccccattttttgtccagcatgaaacaaaggaatgggggcagccatcttttacagaaaacggggtggacgtcacatatccccgccgtgccggtttaagttcgtttggcgcttcaggatcaaatgcgcatcttattttggaagaatatattccggccgagagccattcagaaacgattttaacgaaaaatgaaggaatagtgatacctttgtctgcgagaaacaaagatcgtctgcaggcttacgctcttaaacttcttgattttcttagcgaggacgtcaatcttttagcgttagcttataccatgcaggcagggcgggttgaaatggaggagcgtgcggccttcatcgtaaaagacataaaagatttaacggctaaacttcgggcgtttgccaatggagaagaagagatcgagggctgctggaccggacaagccaaggagaatcaggaggcggctgggctagcatcggtaaatgcgctgaataacaatttgacaacagacagtgaaatgatggaaatggcgaaagcatgggttcaaggacagcgggtcacctgggacgacctatacggcgatcgcaagccgcttaaaatcagtgttccgacctatccgtttgcaagggagcgctactggatcccggttcctgaaatgaaaaccagcactgtgaatcatatcttacatccgctggtgcaccgcaatacatcagactttactgagcagcgctttagctctgtatttacaggcacggaatttttcctttcagatcatgttgtacagggacagaagattttgccgggcgttgcctatttagaaatggcaagggaagcagcggaaaaagctgcaggcgatctggacggcaaacaaagagtggtgtcgcttaaagacattgtgtgggtgcgtcctatcacgattgaaagtgaaccaaaagaaatacatattggcctttttcctgaggataacggggaaatctcctttgacatttatagcagctctgaacataaagaagaagccctgacgatacactgccaaggccgcgctgtcatttcagatgaagcggacacttccattttaaacctttcatcaatacagacagaatgcagtttggacacagtgacgtcagaacaatgctatgcagcgtttcgaaagattgggcttgactatggagagggctatcaagggattgaaaaagtctatgtcggcaaagatcaattgcttgcaaaaatctcgttacccgcttttctaaaaaacgacaagcagcattttgcgctccacccgagtttgatggattccgcgttccatgccacagtcggttttatcgttagctcagtcaatgccgctggacaagctcagacgctgtctcttccatttgcgttgcaggaggttgatattttcagcccatgtccagagaagatatggtcttatattcgatacagttcagacagtaaagcggaggacaaagtcagaaagtatgatattgatttatgtgatgagaacggacacgtttgtgtgcgaatgaagggtgcctcgatgcgggcacttgatggagagcggcattcaaggtctcaactagtaactgattctcagctgaccgggcatacgatgatgatccccgtctgggaaccagtctctctagaagcggaggataatgcttcgtttgctggtacacgagttgttttatgcggtgctgctgaagctgatcgggcattaataaagcatcattatccgcaagtatcctttatcgatatccggcctgcagatgacattgagggaatagcggacaaactgcaagcgtacggaagcattgaccatgttttgtggattgccccgtcacaccggggaagtataggtagtgatggacaagaagaagctgttcttcacttatttaagcttgtgaaagcatgcctgcaattaggctatggcgagaaacaacttgaatggtctcttgtgacaatccaagcgcagccggttacgcaacatgaggcagtacaacccgctcatgcaagcattcatggacttgccggcacaatggcaaaggaatatccacactggaaaatccgtcttctcgatcttgaaaaaggctgcacatggccggtaaatcacatgtttgcgctcccagctggccgccttggccatgcttgggcctatcgtaatcagcaatggcatcagcagcaattgatcccatatcggcactcactgtcaggcgacacgctatatcggaaaggcggagtctatgtggtcatcggaggagccgggtatatcggagaggcgtggagtgagtacatgatccgccgctaccaagcgcaaatcgtttggattgggcgaagtcaacttaatgctgccatccagtcaaaaatagaccgactttcggcgcttggccctgagcctttctacattgcagccgatgcagccgataagcattcattgcagcaggcttatgatcaagtgaaaatgcgccatcctcatattcacgggattgttcactctgcgatggttttatttgagcaaagcctggaaaaaatgaagccggaagaattcaccgctggactggcggcgaagatcgatgtcagtattcggatggcccaagtgttccgccaggagaatgtagattttgttttattcttctcttcgcttgtagcccatatcaaaaatgtgaagcaaagccattatgcctctggctgtacatttgcagatgcttttgctcaccggctttctcagagctgggcatgccctgtaaaagtcatgaactggggatattgggggaatagtgaagcggctgaggatgaacattatgtacagctcatgaatcaaatcggcttaggtttaattgagcctgcggaagctatgaaggcgctggaagccctgctttctgggccagtcagccaaacagctttcattcatacgacaaagcctgtagcagtcgaaggcgtgaatcagaatgaattcatcgctctttatccagagcaaccttcagcagatgcagagagcctgatggagcgtctgccgactacggcacgatttcaaagagtgacacatgaagagcttgatgatcttctttacaggctgttgttaggacagcttcaaacagccgggctgtttgatggttatacattatcggttgaacgtcttcaacaatataagactcgtgaattttatggaaaatggattcggcaaagcagcgaatttctcttgcagcatggctatcttaagaaagttggagattcattggtgaggaaggaccaagcagaggatatcgagctgctttggcaagaatggaatgcgaaaaaagaaaagtggcttaaagacagcgagacaaaggcgatggttgtattagcagaggccatgctgaaagcattaccggatattttgacagggaaagtccctgcaacagatatcatgttcccgcattcctcgatggaactggtggaaggcatttataagcataacaaagtggcagattattttaataaagtgcttgccgatacattattagcttatctggatgaacgtctgaagcacgaccctgaggcatcgattcgcattatggaaataggcgcaggcacaggcggcacgagtgccggaatctttgaaaaactgaaaccatatcaaaagcatatcaaagaatattgctatacagatctgtctaaagcatttttgctgcatgcagaaaaggaatatggggcggaaaatccgtacctgacatatcagctttttgatgtggaaaaaccgattgatcagcaggaatttgaagcgggaggctatgatgtcgtcattgccgctaatgtccttcacgcaacaaaaaatatccgtcaaacactgcggcatacaaaagcggtaatgaaaaacaacggaatgctgctgctgaatgaaatggcgggaaacagcctgttccctcacatcacctttggtcttttggaaggctggtggctgtatgaagatcctgcagtgcggattcccggctgtccaggcttacatcctgacagctggaaagcggcacttgaaagcgaaggctttgaatctgtctttttcccggccgaggcggcacatgatctgagtcaccaaatcgttgcagcctcaagcaacgggctggttcgccgtatgatgaaaaatgtgatcttgccggagaaggttgtttcacaagcgtctaatcaggagccagcctacattcataccatagattcagaggaagctggacaatcaaaacatgctctcctaagagaaaaaagcacagaatatatgaaaaaactaatcggggaaacgttgaaaattcctgcaggaaagattgagtcatctgaaccgcttgaaaagtacgggattgattctatcgttgttgtccaactgacaaatacattgcgtaaagaatttgaccatgtaagcagcactttatttttcgagtaccagaccattgacgcattagttgatcatttcatcaaaacaaaaacagaagcgctgatgaaattaacaggtcttgaccgtcaagttcaacaacagacaccggccgaaagcagaacccaatcctcacagaaacctgatcaggccgctaaaagaacacggcgctatcgcaagcttggcttcagcggggagaaagaaacaccgacaaacactcttgcaagccgtgacgttgccattatcggcatttctggacgctatcctcaggcggaaacagcagaagacttttggaacaacctaaaagaaggaagaaattgtattgaggaaattccgaaagatcgctgggattggaaagcttattacgataaagaaaaagaaggatcaatttatacgaaatggggcggatttatcaaggatatggacaagtttgacccattattctttcagatttctccgcttgaggcagaaagaatggaccctcaggagcgattatttctgcaaaccgcttatgcaagtattgaagatgcgggatacacgcctgactcgctctgttcaagcagaaaaatcggcgtctttgccggagtcatgaacaaaaattatccgaccggctacggctattggtctatcgccaacagaatatcctatttactgaatttccaaggcccgagtcttgcagtcgatacagcctgctcatcctccctgacagcgattcatttagcgctggaaagcatctatagcggatcgagtgattgtgccattgccggcggtgtcaatttagttgtcgacccggttcactatcagaatttatctgtcatgaatatgctctctgctagtgatacatgtaaatcattcggcgatgatgcagatggatttgtcgacggtgaaggcgtaggcgccattgtgttaaagccgctgcagcaagcaatagcggacggtgaccatatttacggtgtgataaaggcaagtgccattaatagcggaggaaaaacaaatggatacacggttccaaatcctcatgcacaggcacaggtaattaaagaagcaatggagcgcgccgacattcctgcccgaaccatcagttatttagaggcgcatggaacaggcactgcattaggagatccgattgagatagcggggttaacaaaagcatttgagaaagatacgcaagagaaacagttttgtgcgatcggctccagcaaatcaaatatcggtcattgtgaaagtgcagccggaattgcagggctgacaaaaatactttttcagtttaaatatggccaaattgcgccatcattgcatgctcagcggttgaatccgaacatcgagttcagccatacgccatttgtcgttcagcagcaacttggtgaatggaaacgcccggtgattggcgggcaagaggtgcctaggcgcgctggcttgagcagttttggcgccggagggtccaatgcccatatcatcctggaagaatatattccaagaacgggggcgcaaacgccgaaagaccatcctccagcgctgattgtgctgtcggccaaaaacatggaacgcttgcaagaaaaagcggaacagctgcttacagccatcaaacaaaaaaggtaccgcgaaacagacctgatcaggatcgcctataccttgcaaacaggccgtgaagcaatggaagaacggctggcctttatagcggaatcactagaggatcttgagagaaagctgaacgattttatcgaaaacaaagcagacagcctgtatctggatcgcatcgaggataacaaaaaagcgttagcagttttatcagcggatgaggatacggaaaaaatcatagaagcatggatgagcaaagggaaatacacgaaactactggatctttgggtgaaaggcttgtctttcgactggggcatgctgtacggcacccaaacgcctgtccggatcagtcttccggcatatccatttgcaaaagaacgttactgggcaccaggcgcggcaaaggctccggcgtctatagaacaggatcatgatcagcaaacagaagaacctttcaaggttatgacttttcaagaagtgtggaaagaagagccggcgactctcacatcgaaacgtatcaaaacgctcatctgttttctgactgaaagagaaaagcaaaacgcatttgcttcagccctgaaaaacgttgatcaagacaccaaggtcatttttatatcacagggcgaagtgtacagcaaacagtctgaatatagctaccagattgtgcggcaagaacccgttacttttgaaaaggccttccagagcattaaagaagaacttggagagccagatgcaatcctctatatgtggcctatggaagacaagcgctgtataaaggaccattcctgtattgtttacctattacaaggtatgtccgcagcaaagcttcatccttcacggctgctgctggcaggatgttttgaagatggtcttgaccgaagttatctggaatcatggattggcttcgaacgttcactcgggcttgtcctcccgcacacaaaagtgactggaatctttcagccggtggaacaaggatcgatggatgattggacacgtaaaatatggggagaattacaggcttcagctgaacaaacggttttgtatcagaatctgaaacgatatgtaaatcacattgaacagacaacgatacaaccggacgacagcaaattgaagtctggcggtacttacctgattacaggcggtgtaggagggcttggttatttatttgccaagcatttggccaaaaactatgccgcaaacctgattttgacagggcggtcgccttttaatgatgaaaagcaaaagcaaataaaagaattaaaggatctaggcggcgaagcgatgtatgcagaagcagatgtgtctgatcctatcgcaatgggagactgcgtaaaaagagggaaagaccgattcggtgccatcaacggtgtcattcatgcagccggaatcgagagcgactctgctatttttgacaaaaagatcgaaagctttcagcgcatcattgaaccgaaaatcaacggcacgatagcgcttgatgaatggcttaaaaatgaagaccttgattttatgtgttatttttcttcttcttctgcggttttaggggattttggatgttgtgattatgcgattggcaataggtttcagatggcttacgcacaatacagaaatgagctgcataacggtaaaacgtttgtcatcaactggcctgtatggaaggatggcggaatgaagatcggtgatgaggaaacaacggatatgtacctgaaatcaagcggccaacgcttcctagaagccgaggaaggcatccgtatgtttgagcacatcctagctcagcaggatgctcagcatctcgtgatagccggtcagcccagccgtgtcagcagatttttaggaatgactgaaccagctattccagaaccggccactcaagcccctctagcacaagaaaacaaggatgaggtaaaaacgttaagcattgaaaagcgtttagaacacgacttgaaagagcatattcacacattgcttaagatttcaaaggacaagctgaatttgaacaaaaattgggccgacttcggatttgattcaatctatttggctaaattctcgaatgtgttatcaaagcatttcaacatcgaagtgacaccggctttatttttcggctattcgactttacaagaattgatcggctttttcttaaccgatcataaagagctgattgaagcattttaccgggatgatgcatcagaggcgcaaaagccccctgaagcttatgcagcaattcctgtagctccagaaccggaaaccagtaaacaaagcattcggcaggttcacgatgagcctattgccattatcggcatgagcggcaggttccctcaagctgattcggtccatgagctgtgggataatctgaaaaaaggtaaatcgtgtatctctgacatcccgggcgaacgccgggactgggggagagctaacagagatccagaaaaagcagtgccaaggtggggggcatttttgaagggcatagaccggtttgatccgctgttttttcaaatatcgcctaaagaagccgaaagcatggacccgcgccagcgcatttttctagaggaagcatggcacacgtttgaagacgccggctatatgggagatcggataaaaggaaaatcctgcggtgtttatgtaggtgtggaagaaggggaatatgcgcatctaaccggagatacggattacattaacggaacacaaaacgccacattgtctgcgagaatcgcatacgcattggatttaaaagggcctaatatggctttgacagcagcatgttcatctggactggtagcgattcaccaggcatgttcagctctgcgtcagggggattgtgaaatggctttagccggcggcgtcagcttgaatatttctcacatgtcttttgaggcgctgacaagggccgaaatgctgtctccgaacggacaatgcaaagtgtttgaccaggatgccaatggtcttgtgccaggtgaagcggtggctgctgttctcttgaaaccattatcaaaggcaattgaagataaagatcatatttatggctgcatcaaggccagcggcgtgaattacgatggcaaaaccaacggcattactgcgccaaatccttttagccaggcagaattgatcgaaaacatttatgaaaaaaatgaaatcaatccgctcgatattcaatatgtgatggcgcacagtaccggctcgaatcttggtgatccgcttgaggtccaagcgttaacgagcgtgttcagcaaatatacgaagcagaagcaattctgtatgatcagctcaattaagcctttaatcggacatacatttgcagcgtcaggaacggttgctttaatcagtatgctgatggctatgaaaaaccagatgattccggccactcatcactgtgaatcggaaaaccagtatattccgtttaaagaaagcccatttgtgctttgcaaagaaaaccgttcgtggatcaggaaatatcagaagccgaggatgggaacgatcagcacgactggaatcagcggcaccaatgcacatgcagtcattgaagaatacattccggaagatcagccgcccacacagcggcatcaagggtcaccgcaggtcatcgtgctttcagcccaaaatgacgatcggcttcaggatgctgcctgccgcatgattgcgtatctggagcagaatcataacctttctttacctgatatggcatatacgcttcaggttgggagaaaagccatggaagcaaggctcgcgatcgttgcaaacaatcagaagcaattggtgcaaaaattgaaggaatatgtggaagcaatgaagaatggtggggtatcaggccaacagagatccctttatacaggatatacagaagggattttagaagaacaagatgaagcagttctgcaagctctcgcaaaagaaagaaatttggaaaacatcgcggattgctgggtgaaaggatatcagattccttgggaactccttcatgatggcgatcacgttcgaatggtttctttacctggttatccatttgcaagggagcggtattgggtttcgtcaggcacccagcaatcagtggccgttaaacagcattcacaagatatgaaaacagagattgacgagccgaatggcaaaaaccatattcaaaagatcattgttcaatttttagcacgagaattgggcatatctgaggatcgaatcaatttcaaaagaaactttttggattatgggatggattcaattcttggccgaaaattgatgcggcatatcgaaaaaaccacgcagctgaagatggccggtcgggaaatccttgaatgtcagacagtccaagctctatctgaccatttggccttaaaagcggaaaaacaaaatcatagcgcagcagcacatcaaataaaggacacgtatacagacgggcaaatcatcggattaatgcaagaggtggcgctagggaaattggattttaagagtgtgcaaaacatcatagaagggagtaaatcgtatgaatcataaagaaattctcgatgccttcagatcaggagaattaaccatttctgaggtggaagaacatcttaaaggcatgaagcggcagttgaaaagcccgctttctgaagggcaaaaagggctgtggatgcttcaaaaaatgtctcctgggatgagtgcatatcatattcctttatgctttcgcttcagcaaaccaatacatgcagagacgttcaagaaagcccttctgtttgtacagagacaatatccgatcttagccagtgtgattcaagaagaaaatggcattccatttcaatcggttcagttatcaaaggatctttattttgtggaagaggatatatcagcaatgaaatcagcagatatctttccttttctaaaagaaaaagcaaaagaacctttccagttggaagctggtccgttatggcgcacacacctttttcatcggttagaagaatgcattgttcttataacaattcaccatatcatatttgatggtgtgtcgatgctgacattgatatcggcgctattcgaagcgtatcaacaattgctgaatgggattgagcccttgcagcagccattaacagctgattattacgattttgtcgattgggaaaaacggatgctgactggcagagaaggggaagagcatctcgcttactggaaagaacagttgtctgggagtctgccagttcttgatttgcctgctgaccgtccgcggtcttcatcacgaaaattcaaggggcaagcttataaaagcttgctcccccatcacctgagcaatcaaattaaatcgtttgcccgcaccaatcatgtgaatgaatcggttgtgtttctctccatttacaaagtgttgctgcatcattatacaaaacaaaaggatatcattgttggcgttccgacaatgggtcggcaagatgacagatttgaaaccctaatcggttattttatcaatatgatggctgttcggagcaagaatatcggatctcagccattaacagcatttattcgggaactgcagctgacagtggctgacggcctggatcatgcggcgtttccgttccctgcattggtaagagagctgaatgtagaccgatcggccgcggattctccggtttttcaaacagcttttctgtaccaaaacttttttcaggcaacaggcttgcaaaaagtgctcgaaccgtatcaaacgcttggcatcgaatatattgaagacattcggcaagagggtgaatttgagctggcgctcgaaatatatgagcaagaaaatgaaacagtgcttcatcttctgtacaaccctgatttgtatgaactgtcctccattgaaaacatgatggagaactatatgaagctcgcgcaacacatgatggatgacccgtctttgccgcttgaagcctactctttgcgattaaatcaagaacaaactaatttggtggaacaatggaatgcgacagggacaaacatcgcaaatgacaagtgtatacatgaggtgtttgaggaaaaagcgaaacaaacccccgatgcggttgctgtgatgtttgaagacagatcacttacatataaagaagtagatgaaaaaagcacatctgtggcagtctaccttcaacatcagggtgttagacctgaacagcccgttggcatttgtgcagagcgttcgtttgatatgatcatcggaattttaggaatactgaaagctggcggagcgtatgtgccgttagatccaagttttccgcaagaacgattagagtacatgctcaaagacagtcaggcatccattgtcctcacccaacctaacgttcatgataggatcagcggattaactggcagccatgtaaaagcgatcaatatcgagttagcttgccgaaacgattatacagaccagcaaagcagcggtttaaagcgggaagtaaaaccggaacacctcgcttatattatttatacatcgggaagcaccggagagcctaaaggggttatggtagagcatcggagcattatgaataccctgaattttcttgaatctcactatcctgtaacggctgaggatgcatatttattgaagacgaactatgtgtttgatgtatcgatctcagaattattcggatggtttattggagacggccgtcttgtgattcttccgcctaatggggagaaatcaccgcagctttgcatggattatattgaaacatataaagtgactcacattaattttgtgccggccatgctgcatgtttttttagaaatggcgaaagacaacaaacgattcacagaggatggtccgctgaagtatatgatggttgcaggtgaagccttccctaaagaattagtgaaaaaggcggtatcactctttacaaactgccgtgttgaaaatatatacggaccgacggaagcctccatttacgctgcgtatttcggatgcggaaaaggagatatcgcaagtcaccatacaccgattggaaagcctgtctccaacacgaaaatttatattgtggaccagcatttaaagcctgtcccgatcggaaagcctggtgagctatgcatcgctggagccggcttagcaagaggctactttaaaaagccggggcttacggctgaaaaatttattgataatccctttgaaccagggacgaagctatataaatcgggtgattcagcaaggtggcttcctgacggcaacatagaatacttgggacggattgacagccaagtcaaaatacgcggttttcgcgtcgagctgggcgcaatagaaacaaagctgagtgaatttccgggcattttagatcaggccgtagtggtgaagcagctggaaggccatcaacagctcgctgcttattatacagaggaaagcggacatgcctctgccaatccaaaagatttgcgccttcatctaaaatcgagtctgccggaatatatgataccttcacactttatccgcttagatgagcttccattatcgcccagcggaaaagtgaaccgtaaagaattagaaaaacgcgagatcgtgttcaacataaggaaaccaaatcacttgcaattaacggaaatagaggatcaggtgctgcgcatttgggaggaaacgctcaaggtcagcggatttgggccggatgacggatttttcgatgcgggcggcgattcgcttctggctgtagctgtggctgaacgaatcaaaaaagaattcgattgtgagtttcatgttactgagctgtttgagtattccacgatccgtgcaatcagtgaatacattttggagatggaaaactcagatctagccgggacacaaaatgaagatcattatgatatcaaaaaagatagaaaacacctagaacagaagattcctccttattttgacgacagtgttgcgattgtggggatatcttgccagttcccgggtgcgaaaaatcatcatgacttctggaaccacatcaaagaaggcaaagaaagcatacgattcttttctgaagaagagcttcgcgcaaatggagttcccgaagaattgatacagcatcctgactatgtgccggtgcaatctgtgatcgaaggaaaagacttattcgatcccggtttctttcaaatctcgccaaaagatgctgagtatatggaccctcagctccgcctcttattgctgcactcctggaaagcgattgaagatgcaggatatgtggctaaggagattccggcaacaagtgtatatatgtctgcaagcagcaattcatatagaacgttattgccgaaggagacaacagaaggacatgaatcaccggatggctatgtctcatgggttttagcccaaagcggaaccattcccacaatgatctcacataagctcggattaaaagggccaagctattttgttcattctaactgttcttcatcactagtcggtttatatcaggcatacaaaagcctgacatcgggcgaatcacaatatgcgcttgtcggaggcgcaacattgcacgcacaatcagcgatcggctacgtgcaccaaaacgggttgaatttttcaagcgacgggcatgtgaaggcgttcgatgcttcggcggacggaatggccggaggtgaaggcgtagcagtcatcctgctgaaaaaagctgtggatgccgtaaaagacggagaccatatttatgccattatgcgcggaataggcatcaataatgatggggcagagaaggcaggcttctatgcgcctagtgtaaaaggccaaacagaagtgatacagcatgtattggatacaaccaagatccatcctgaaacggtcagttatattgaagcacacggtacgggaacgaaattaggcgatcctattgaaatgtctgcgctaaataaagtgtacaagcaatacaccgacaaaacacaattttgcggaattggttcagtgaaaacgaatatcggccatttggatacagctgcggggttagccggatgcattaaagttgcgatgagtttataccataatgaacttgcaccgaccatcaattgtacggagccgaatccggatataaagtttgaaagctctcctttttatgttgtccgtgaacgaaaatcgttagagaaacacgcaggtgtccatcgggcggctctgagctcattcggccttggcggaactaacgcccatgcaatatttgagcaatatgaaaacatttctgatgcaggtaccgaaaacgaaggcaatcagccttacatcattcctatatcagcaaaaaatagtgaacggctccaagtatacgcgaaggaaatgctgtcctatatcagtcaagacgagcaaaggcatttctctttaagagatattgcatataccttccaagtcggccgtgaagcaatggataacaggatcgtttttatagtgaacgatctggaagagtggaaacatcagctggaagcttttgtgactggaaagccgctcgcagaaggctgtattcaaggagaaaaaacgagaatgacatccgctgaacagctgcttggaaatgctgaagcagatgatatggcttcatcgcggatatcaaaagaagaattgagaaagcttgccgagatgtgggcaaatggctttcacgttgaatggcgcaggctctatccaaatataaagccacgccgcatcagcttgccgacatacccttttgccgaagaacgatactggcctgaaagcagcaccggcgctatcacaacaattgaaccatctcgtttgcatcctttggtgcaccataatacatcggttctgtcagagcagcgtttcagctccattttcacaggacaagagtattttattgccgagcatatcattaaaggcatggcgattttgccggcggcggtcacgcttgaaatggcaagagccgctatagaacaaggaattggcggattggaggatcatgaaactggaatcaggctgaaaaatgtcgtgtgggttcgcccggttgtagcaggaagtgagccggttcaggtaaatatcggactttacgatgaagatggcggacatattgcttatcggatgtatggtgatccggaatacgctgatgcagaaccagttgtatataaccaaggtaaagcggaattgattcagttaaagcgagaaaaagcactggatctttctaagatcaagaaacaatgtgatcaaagcaaaatggatgctgcctcgttttatgaagggatgatcggcgccgattacggtccaggttacaagagtgtagaggccgtatataaaggcgacggccagctgcttgccaaattatcactgccagaatctgttgcacatacgttgggcgattatgttcttcatccaagtgtaatggacggggcgttacaggcggctgaatatttgcaaaatgtcgtcagagcggaactttcagacactgaagactttaaggcagcactgccatttgcactggaggaacttgaggtttttcgtcagtgcgtttctgacatgtgggtttatgttcaattcaactcgaaaaacaaaccgggagatttgatacagaaagtcgatattcacctatgtgatgagcatggcatgatctgtgtgcggctgaaaggattttcgacgagagtgatggaggcagatatacaaaccgaaccatcaaaaatcaacgctgaaactttattgcttcagcccgtttggcaagaacaaaaggctgctaacagcttagctgcaaaaaaatatgcagagcatctcgtattcctatgtgaatatgatcatgagacgagaaaacaaattgaagcagctatcgaggatgtccatgtatacagcctggaagcaaggccttcttcagtagatgggcgtttccattcttatacagaacaagtgtttaaaaaggtacaagagatcattcgtacgaaaccgaaagacggcattctcgttcagatcgtgacctctgccgagggagaacagcaattgttttcagggttgacaggactgctgaaaacagcttgtcaggaaaatgccaaactaaccggccaaatgattgaagtcagcagtgaagaaagtggagaaagcattgctggcaaactgttagaaaatcaaatgagcggcgattcatatgtcaaatatcaaaacgggacacggtatattgctgattggcgtgaaatcaaacaggcaaaaggagacggcagcaaaccgtggaaagacaatggcgtttatctcattacaggaggtgccggcggactaggtcatatttttgcaaaggaaattgcggaacaaacgaaaaatgcgacagtcattctggcgggccgctcacctcttagcgaaagcaaaagcaaaaagctgaaagagcttcatagcaagggggctgacatcacctaccggcaaacagatgttaccaataaaattgaagtctatcagctcattgacgacattcaaaaaagatatggccgtctgaacggtattcttcatagtgccggaatcatcaaggacagctacctggttaataaacaggcaaaagatctgcacgatgtactggcgcctaaagtaaaagggcttgtttatctagacgaagcgagtaaggatttgcctttagacttctttattctcttttcatctctttcaggaagtttagggagcattggtcagtctgactatgcggcagccaatgtatttatggatatgtatgcaggctatcgaaatcggcttgccgacctcagccagcggcatgggcagacgctttctgtaaactggcctttatggagagatggaggcatgcaggtcgatcaagaaactgagaaaaggcttgtgcaacttgccggtattgttcctatgagggcggaaaaaggaattcaggcattatatcaagcacttcattcagaggcaaaccaagtaatggtgatcgaaggcgatgtgcagaaaataaaacaaaacatgctggccaaaaacgcctcagcacctatggaaaagaaggaagcagaacacatgactgaacaaataaatagcattgatgcagacagtttgctggataaagtaaaggcgatgttaaagcgagagatcgccaagctgttaaaggtcaagcttgaaacgattgatgatcatgccgagatgacggtgtatggttttgattctatctccatgactgaattcaccaaccatatcaatcgcgcctatcagttagagctgacgccaaccgtattttttgaccacccgacgattcatgcgtttggcaagcatttgtcagaagaatatcaatcggtatttgcgaagacatttgctgtgcgcgctgtatcggctcagattcagcctgccgcgaaacaggaacaagccgtgcgtgccaaagctaaaagacgcagaaagcagcaagtcatgctgccaaacgccatacagagtgatgctgggcctgagccaattgccattgtgggcataagcgggattttccctatggcgaaagacgttgaggcgtactggaacatcttaaaagagggcaaagactgcatgacggaaatcccgaaagatcgctgggattggcgtgaatatgaaggtgatccggcgaaggaagtcaataaaacgaacgtgaaatggggcggttttattgacggtattgcagattttgatccattattctttggcatttccccgcgtgaagctgaacaaatggaacctcagcagcgcttactgctgacttacgcctggaaagcgatcgaagatgcaggatattcggcgaaaaggttgtcaggcacaaagaccggcgtcttcatcggaacgggaaatacaggatacagctctcttctatctaaagcgaactcggcaatagaaggatcagcggcagccaatacgagcccatcggtcggtccgaaccgggtcagttatttccttaatctgcacgggccgagcgaaccgattgatacagcgtgctcaagttcactagtggcgatccaccatgccatctcttcaattgaggaaggcacttgtgacatggcattagccggcggtgtaaatacgattatccttcctgaggtgtatatcagctttgataaggcgggagcactgagcaaagaaggaaaatgcaagacgttttcaaatcaagccgatggttttgcgcatggggaaggtgccggcatactgttcctgaaaaaattaaaagcggctgaagaagcgggagaccacatttacggagtcataaaaggcagtgcaatcaatcacggcggccgtgcagcctctttaacgactcccaatccgaaggcgcaggcagatgttattcagtcggcatatcaaaaagcgggaatcgatccgaaaaccgtgacctacattgaagcccacggaaccgggacggagcttggagacccggttgaaattaacggtttgaaatcagcttttaaagcattgggtgtaaatgaaggagacacatcagtcaatccttactgcggtttaggttctgtaaagacaaacattggccacttatcgctggcagccggtgcagcaggagttattaaaatattattgcagcttaagcataaaaccttagtgaaaagtctgcattgcgaaaacgtgaatccatacattcagctgaaaaacagtccgttctatatcgtacgggaaacggaagaatggaaagcgctgaaaaatgaacggggagaagagcttcctcgccgggcaggtgtcagttcatttggaatcggcggggtaaacgcccacgtgattatcgaggaatatattccggaagcatccgatgagaatataccatccatcacgccggaacatccgggtatcttcgttttatcggctaaaaataaagcgcggctaaaagaacatgcacagcagctggcagatgcgcttgataagcaatcatatagtgacgtaaatctcgcccgaatcgcttatacactgcaagccggacgggatgcgatggaagaacgtctcggggttatctccggttccattgaggatgtacagcaaaagttaaaagactttgcagcaggcaaaagcggtgtggaggatgtatttaaaggcaggattgataaaggcacactccaaatgctgacagaggacgaagagattcaagaagctgtcgagaaatggatggaacggggaaagtatgcaaaattgcttgaattatgggtaaaggggcttgatgtagactggacgaaattgtatggcgagaatctgccaaagcgcatcagcttgccgacgtatcctttcgcaaaagaccgttattggatctctgatcatattgaaaaaatcggcagcattgatgcaaatcaagcagcctcccgccttggcggagccgtgctgcatccattaatgcatcaaaacacatcgaatctctcggaacaaaggtttagctctatttatacgggagaagagtttttccttgctgatcatgttgtgaaaggccaacggattttgccgggagtggctcatcttgaattggcgcgggcagctgttgagcaggccgcagaggtagaaggtgtaccgtgcaccatgaagctaaagaatgcggtgtgggtgcggcctattgttgtagaggatcagccacagcaagtacacattaggcttttaccgggagaaaatggtgagatctcttatgaaatctatggtcattcagacgttactggcgaacagtcaattgtctacagtcaaggcagcgcggtattgaatcctgctgaaaatctgccggcggttgattttcaatctctgcgggagcagtgtcaggaaagccatttcagcgtaaacgaagtatacgacacctatcgaatgattggatttgaatatggtcctgcttatcgcggagtgaaaaaaatctatacagctgaacaatttgttttggcaaaattgtcattgcatccgtcagctgcagatacgctcagccaatacaaaatgcaccctgggctgatggattctgctttgcaggcgtcaagcattttgacaggcgccggggataaccagctgacactgccttttgctatccaggagcttgaaatcttcggagcatgctcgtcagaaatgtgggtatacgcaagatacagccaaggcagcaaggcaactgataaggtgcaaaagcgcgatattgatattttagatgagagcggcaacgtttgcgtacggatgaaaggattatctttcagagcagcggaaggcggctctggatcggcggaatctgatcaaacgctggcaaccctgatgtttgaagaaaaatgggtgcctaaggattttaaaaaagaaagtcctgagcctcattacgaacggcacattgtcatgctttgcgacatgaatggcctctcaaaagatcgcattgaatcaagattgacaggagcggaatgcatcgttttggagtcattccgcgaaggacttgcagagaggttccaagattatgccgaacaagcgcttgagacggtccagggtcttctcaaaagcagacctcagggcaatgttctgatccagctgcttacctctgcacaaagaaagcagtactcattctcagggctatcggcgctccttaaaaccgccggcctggagaataaaaaactaatcggccagacgattgaaatcgattcacatgaaaatgttgaaagtgtaatagaaaaactgaaagagaataaaaggcacacagaagatcagcacatcaaatatgaaaaaggcaaacggtacatcaatgatctggatgaaatgcaaatagatgatcgggaaataagcatgccgtggagagataaaggtgtatacctcatcacgggcggcgcaggaggacttgggtttatttttgcaaaagagattgctcgtcaagccgaacagcctgtactcattctgacaggcagatccgcgttgaatgcggatcagcaggcggagcttaacgaacttcagcaattaggggctcgcgcagaatacaggcaggttgacgtgacacaaacggaagcagcctccgagcttatcacaagcattacgtctgattacgaagacttgaatggtgtcattcacagcgctgggctgattaaagataactatcttatgagcaaaaccaatgaagagctgacacaagttctcgctcctaaggtgaaagggcttgtgaatgtggatgaggcaaccgagcatcttgcgttagatttctttatcctcttttcttcaatatcaagtgttgccggcagcgcgggacaggccgattatgcaatggctaatgcatttatggacagttatgctgcttatcggaatgcgcttgtaaccgccatgtacaggcacggacaaacgttgtcaatcaattggccgctctggaaagaaggcggcatgcgcgcgaataaagaaattgaaaacatgacgttgaaaaacacaggtgtgactccaatgcggaccgagaccggcattcaagcgctgtataaaggtttggcatttggcaaagatcaagtcatcgtcatggaaggattcaaagacatgatgagggaaaagctgactcaaaagccgtcttctgatgatgtaccaatgaaaacagtgcaagtacgggtgacatctgaagcaagaatggatcaagggaatatgtttgaccacattcaagaagttttaaagcaaacaatctctcaattgctcaaaatcaaacctgaagagattgacccggacatggagtttaatcaatatggatttgattcgattacgttaactgaattcgcaaatacactgaatgagaagtgcaagctggatcttacgcctacggtcttctttgagcacgcaactgtttatgcatttgcagggtatctgtcagaagaatatccaaatgcttttacagctcaaacgcctgccaaagctgaggtgctaatgcagcctgtcgaacagaatataaaaaatatgacgttttcgactgaaaaccgctttgtaaaaccttcggtaacaccaatgcaaaaggaagctgatcacaagcctgagcctattgcgattgttgggatgagcggcgttttcccaaaggcaaaagacgttgaggaatattggaagaacctgtcatcgggcgcagattgtattacagaggttccaaaagaccgctgggattggcaggagtattacggagaccctctgaaagaagcgaataaaacaaacgtcaaatggggcggttttattgatgaagttgctgactttgatccattgttcttcggcatatctccgctggaggctgagcagatggagcctcagcagcgcctgttgatgacctatgcgtggaaggcggtagaagaagcgggacactcagcgagaagcctggcaggaaccaaaacgggcatcttcattgggacaggaaacacagggtacagttcacttctgtcaaatgtagacatcgaaggctcagcggctgcgaatatgagtccttctgcaggaccgaatagagtcagttatttcctgaacattcatggaccgagtgaaccgatcgacactgcgtgctcaagctctttggtcgccattcatcatgcggtttgcgccattgaaaatggaaactgtgaaatggcgattgcgggaggggtcaacacggtcgtaactccgcaaggccatatcgcctatgataaggccggggcgctgagcaaagaaggaagatgcaaaacattttctgacaaagccgatggattcgcagtcagtgaaggtgccggcattctctttctaaaaaagctgacagcggctgaacgagacggtgatcatatttacggtgtcattaaaggaagtgcggtaaaccacggtggccgcgcaaattctctaacgactcctaatccgaaagctcaggcggatgtcgtaaaaacagcatatgaaaaagcgggaattgatccaagaaccgtaacttatattgaagcgcatgggactggaaccaagctgggcgatccagtagaaatcaacggcttaaaagcggcatttaaagagctgtatgaaaaaacgggggacccggctgttcatggcagccattgcggacttggatcagcgaaaacaaacatcggtcacttatcgcttgcggccggtgtggcgggtgtcattaaagtgttattgcagctcaagcataaaacgcttgtcaaaagtctgtacagtgaaactgttaatccatatatcagactggatgacagcccgttttatattgtgcaggaatcgagagagtggcaggcgcttcgggatgaagctggccgagagctgccgcgccgcgcaggcatcagttcgttcggaataggcggcgtcaatgcccacgtggtcattgaggaatatattccgaaagaaacaacccatcctgcaacagcaccagccgtgacagcacagcacccgggcatctttattttgtcggcaaaggatgaagatcgtctgaaagaccaagcccggcaattagcagactttatcagcaagcgatctatcactgctcgtgacctcactgatattgcttatacactccaagaggggcgtgatgcaatggaggagagattagggatcatcgctgtctcgactggggacttgctggaaaaactgaacctctttatagaagggggcaccaatgcgaagtacatgtacagaggcagagcagaaaaaggtatcgcacaaacattgagatcagatgacgaagtacagaaaacgctcaacaatagttgggagcctcacatatatgaaagactgcttgatttatgggtaaaaggcatggaaataggctggagtaaactgtatgacggcaaacagccgaaacgcatcagcctccctacctatccatttgcgaaagaacgctactggataacggatacgaaagaggaggcagccgcccatcaaacagctttaaaaacagtcgaatcagcagctttgcatccattgatacatgtcaacacatctgatttgtcagagcagcgtttcagctcggcctttacaggtgctgagttctttttcgccgatcataaggtgaagggaaaaccggttatgccgggcgtggcatatcttgagatggttcatgctgccgttacaagagcagtgagaagaaccgaagatcaacaatctgttattcacatcaaaaatgttgtgtgggtgcagccgattgtggcggatggccagcctgttcaagtggatatcagtctaaatccccagcaggacggcgagattgcttttaacgtctatacagaggctgcacacaatgatcgaaagatacattgtcaaggcagtgcttcaatccgtggggcaggagacattccagtccaggatatcagcgcgcttcaagaccaatgcagtttaagcacactctcacacgaccagtgttatgaattgtttaaggcgatcggcattgactacggacctggttttcaagggatagatcggctttacatcggccgcaatcaagccttggcagagctttctctgcctgctggtgtaactcacacactgaatgaattcgttcttcatccaagtatggccgactctgctttacaagcgtcgatcgggctaaagctgaattccggtgacgagcagctttctctgccttttgcgctgcaagagctagaaatattcagcccgtgtacaaataaaatgtgggtgtctgtgacatctcgtcctaatgaggacaaaatacagagactggatattgatttgtgtgatgaacaaggccgagtgtgtgtaagaatcaaggggattacctcaaggctgctggaagaaggcatacaaccgccagacgggccgacatcactaggaaactccaaagcaactcttaacggagcgcttcttatggcgccgatatgggatcgagtgcagctggagaagaggagcatttcgcctgctgatgagcgtgttgtcatcctcggaggggatgacaacagcagaaaagctgttcaaagggagtttccgtttgccaaggagctgtacattgagccgaacgcatcaattcatagaattacaggccagcttgaagcactcggatcgtttgaccacatcgtgtggatgtctccttctcgtgtgacagagtgcgaagtcggcgatgaaatgatagaagcccaagatcaaggcgtcattcaaatgtataggctcattaaggcaatgctttctttaggctatggacagaaggagataagctggacggtcgtgacggtgaacacacaatatgttgatcagcatgatattgtcgacccggtcgatgccggggtacacggcctgatcggttcaatgtcaaaagaatatccaaattggcagacaaagctgatcgatgttaaaaaatacgaagatctgccgttatctcaactcctttccttgcctgccgatcaagaagggaatacgtgggcctatcgaaacaagatttggcataagcttcgtctaattccagtacacaacaatcaaccggtgcacacgaagtataagcacggaggtgtttatgttgtcataggcggagctggcggtattggtgaggcgtggagtgaatatatgatcagaacatatcaggcgcagatcgtttggattggcagaaggaaaaaggatgcagccattcaaagcaagctggacagacttgcacgtctagggccagccccgtattacattcaagcagatgcggctaaccgagaggaattagaacgcgcgtatgaaacaatgaaacaaacgcatcatgaaatcaacggcatcatccattctgcgattgtcttacaagaccgaagcctgatgaatatgagtgaggaatgtttcagaaacgttcttgctgcaaaggttgatgtaagcgtgcgaatggcccaagttttccggcatgaaccactggattttgttttgtttttctcttccgtacaatcgtttgcaagagcttccggacaaagcaattacgctgcgggctgcagttttaaggatgcttttgcacagcggctgtctcaagtatggccttgtacagtagccgtgatgaattggagttattggggaagcattggtgttgtttcatcaccggattaccaaaagagaatggctcaggcaggcataggctcaattgaagcccctgaagcaatggaagctttggaattgctgctcgggggaccgctgaagcagctagtaatgatgaaaatggcaaacgaaacgaatgatgaagcggaacagacagaagaaacgattgaagtgtacccggaaactcacggctccgccatgcaaaagctgcgaagctatcacccgggtgacagcacaaagattcaacaactgttataggaggagaagcgccaatgctgaacacagaagacattctctgtaaaatgcttttcgcacaattacagtccatagggtttttcacagaaagtaaatcccagccggtattggagaatttctatggcagatggtttgaagaaagccaatcgattttagaacggcatcaatttctcaagcgaacggagaacggacatgttccaacacgctcaataggcaccatgagcgagctgtggaaagaatggaatgaacaaaaatctgacctgcttcaagacaataatatgaaagccatggtgacattggtggagacagcacttaaagccttgccggagattctgaccggcaaggcgtcagccaccgatatcctgtttccgaattcatctatggatttagtagaaggggtctataaaaacaatcaagtcgcagactattttaatgatgtgcttgcagatacgttaacagcctatctgcaagaacgtctgaagcaagagcctgaggcgaagattcgaatattagaaatcggagctgggaccggcgggacaagcgcggctgtttttcaaaaattgaaagcatggcagacacatataaaagaatattgttatacagatctgtctaaagcttttctaatgcatgcagaaaataagtatggtcctgacaatccatatttgacatataaacggtttaatgtcgaggagccggcgtctgaacagcatattgatgcgggaggctacgacgcggtcatcgcggcaaatgtgcttcatgccacaaaaaatatccggcagacattgcgaaatgcgaaagcagttttgaaaaagaacgggctgctccttttaaatgaaataagtaatcataatatatattcgcatttgacgttcggccttttagagggctggtggctgtatgaggaccctgatctccgcataccgggctgtccgggcctgtatccggatacttggaaaacggtgcttgagagtgaaggatttcgctatgtttcctttatggctgaacaatcgcatcagctcggccagcagatcattgccgctgaaagtaacggagtcgtccgtcaaaagaagagaacgggggcagaagaagatccaagccatatacaaatgaatgctgaaatcgctcattcacaggaaagcgattctctcatcgaacaaacggcacaatttgtgaagcatacgctggcaaaatcaatcaaactatcaccagaacgtattcacgaagatacgacatttgagaagtatggaattgattcaattttacaggtgaatttcattcgtgaattagaaaaagtgacgggagagcttccaaaaaccattttatttgaacataacaacacaaaagaactcgtcgaatatttagtaaaggggcatgaaaataagctccggacagcattgttaaaggaaaaaccgaagcctgcaaaaaatgaagctcctcttcaaacagagcgtacagatcctaataagccatttacttttcatacacgccgctttgttacagagcaggaagtcacggaaactcagctagcaaataccgaaccactaaaaaaagaaaagacaagtaatttgcaaggaacacattttaatgattctagtacagaagatatcgcaataatcggggtaagcgggcgctatccgatgtctaacagtttagaagagctttgggggcatttaatcgccggagacaattgtattacagaggcaccggaatccagatggcgcacatctttattgaaaacattatcaaaagatccaaaaaagccggcaaataagaaacgctatggcggatttttacaagatatagaggcatttgaccatcagctttttgaggtggaggaaaatcgggtgatggaaatgacaccggaactccgtttatgtttagaaaccgtctgggaaacgtttgaggacggcggctatacgcgaacccggctggataaattgcgggatgatgacggagtaggtgtttttatagggaatatgtataaccagtatttttggaatatcccatctttagagcaggcagtcctcagctcaaatgggggagactggcacattgcaaatcgcgtttcccacttttttaacctgaccggaccgagtatcgctgtcagctcagcatgctctagttcattaaacgccatacatcttgcgtgtgaaagcctgaaattgaaaaactgctcaatggcgattgctggaggcgtcaatttaacactcgatctctctaaatatgattctttggagcgtgccaatctgctgggaagcggcaatcaaagcaaaagttttggcacaggaaacgggcttattcccggggaaggcattggagctgtcctgttaaaaccactttcgaaggcgatggaagatcaggatcatatttacgctgtgatcaaaagcagttttgccaaccatagcggcggaagacagatgtatacagctccggacccgaagcagcaagcaaagttaattgtcaagtcgattcagcagtcgggcattgatccagagactatcggctatattgaatcggcggcaaatggttcggcgctgggcgatcctattgaagtaattgccttaacaaacgcgtttcaacaatatacaaacaagaaacagttttgtgcgataggctctgtcaaatccaatctggggcatttagaggcggcttccggcatttctcagctgacaaaagtgctgctgcagatgaagaaagggaccctggtgccgacaattaacgcgctgcctgtcaatccaaatattaagctggagcacacggctttctatcttcaggaacaaacaaagccatggcatcgcttgaatgatcctgaaactggaaaacaattgcctcgcagaagcatgatcaattccttcggagcggggggagcctatgccaatcttattatagaagaatatatggagacggcccctgagaaagaacatatcgctctccgccagcaggaattcactgccgttttttcagccaaaacaaaatggagcctgcttagctatctagaaaatatgcaattgtttttagagaaggaagcttctctggatattgaacccgttgtacaggctttacacaggagaaaccataatttagagcatagggctgcatttacagtgacatcaactcaagagctgatcgaaaaactaaaggtgttccgaacatcaagagaaagctcactccagcaaggcatctatacatcattcgatttacagccatgtccggaatcagcatctaaggatagagaaataaacgcagcagagcaatgggcacaaggggcatcgattgcttttaaagaagctgatatagggaaccgaacaggctgggttcatctgcctcactatgcatttgaccataatacatcatttcatttcgatgtatcgtctatcaatgagaaatcgtcagatgttgaagacaatatcaatcagccggtcattcaagagcaattcacttatgatgagccttacgttcaaggacacgtcttcaacaatgaacgggtgcttgtcggtgccacatatggcagtctggccattgaagcattttttaacctgttccctgaggaaaacagcggccgtatcagcaaattaagttatatcagtccaattgtcatcaaacaaggcgagaccattgaacttcaggcaaagccgctgcaaaaagatcaagtcatagaactgcaaatcatgtatcgcgagccgtcctctggtttgtggaagcctgccgcaatcggacaatgcggaatcggttcttttgagcccaaaaaagtcaatatcgagaacgttaagcattcattaactaagcttcatcacatcgatcagatgtataaaaccggaaacggtcctgaatggggagagttatttaagacaattactcatctctacagagatcacaagtctatactggcaaaaattcgcctgccccaaagcgggctggcaaacgggcaccattacactgtaagcccattgatgacaaacagcgcgtacttggctatcctcagtttcttagagcagtttgacatgacaggcggcttcctgccgtttggaatcaatgatatccagtttacaaagcaaacgataaaaggggattgctggcttttgattacattggttaagaatacaggtgacatgttgctgtttgatgtagatgtgatcaatgagtcgtcagaaacagtgctgcactactcgggctactcgcttaaacagcttcgtatttcgaatcaaagaggaaatgaaaataaggccatcaaagccagcgatctgaaagctcgtatcagaagctatgtaacagataaactggcagtaaacatggccgatccgtcaaaattgtctcttgcaaaagcgcatatcatggattttggaatcgattcttctcaattggttgcactgacaagggagatggaagcagagacaaagatcgaattaaatccgactctgttttttgagtatccgactattcaagagctaatcgacttttttgcggacaaacatgaagcatcttttgctcagctgtttggtgaagctcatcagcaggaagaacgcctagctcaaatcgaaaaccaaatgaaacagattccggcatacgagacgaacacggataaaacaatcgaacacgcggcagacggcatagccattatcggcatgtcgggacagtttccgaaagcaaacagtgtaacggaattttgggataaccttgtccaaggaaagaactgtgtctctgaagtgccgaaagaacgctgggactggcgcaaatatgccgcagccgataaggaagggcaatcaagccttcaatggggcggttttatagaaggaataggtgagtttgatcccctgttttttggcatatcgcctaaagaagcggcgaatatggacccacaggagtttctgctcttgatacatgcatggaaggcgatggaagatgcaggcttaacagggcaggttttatccagccgcccgacaggagtatttgtcgcagccggcaatacggatacagctgtggttccttccctaattccaaaccgtatatcctatgcacttgatgtaaaagggccaagtgaatattatgaagctgcctgttcctcagctctagtggctttgcacagagctatacaatccattcgaaacggcgaatgtgagcaagccattgtcggggctgtgaatttgctgctttcaccaaaaggctttattggcttcgactcaatgggctatttgagtgagaaaggacaggccaaatcctttcaagcagatgcaaatggctttgtcagaagtgaaggagcaggagttctcatcattaaaccattgcaaaaagccattgaagattctgatcatatttattcggttattaaaggttcaggtgtatcgcatggcggcaggggaatgtcacttcacgcgccaaatccggccggcatgaaggatgcaatgctgaaggcttatcaaggagcgcaaattgatcccaaaacggtgacctatatagaagcgcatgggatcgcctctccattggcagacgcgatagaaatagaggcgttaaagtcaggctgcagtcagctcgaattggaacttccacaggaagtacgggaggaagcgccatgttatatcagcagcttaaagccgagcatcggacacggtgaactcgtctcaggcatggctgctcttatgaaggtcagcatggcgatgaagcatcaaacaataccaggcatatccggattttcgtctttgaatgaccaggtgtcattaaagggcacccgtttccgagtgactgccgagaatcagcaatggagggatttaagtgacgatgcaggcaaaaaaattccgcgcagagcgagtatcaacagctatagctttggaggcgtaaatgcgcacgtcattttagaagaatatattcctttaccaaaaccaccggttagtatgagtgagaatggtgcccacattgtagttctttctgcaaagaatcaagacaggctaaaagcaattgttcaacagcagcttgactatctgaataaacaacaagaactgtcattacaagattatgcttatacactccaaaccggccgagaggaaatggaagaccgcctggcgctcgtcgtccgcagtaaagaagaactggtaatcggcttgcaagcctgcttagctgcggaaaaaggcgataagccgaagagttctgtacctgtctttagcggaaatgcagaaaatggctcgtcagatctcgaagccttgctggatggtccattaagagaaatggtgatcgagactttgttgtctgaaaacaaccttgaaaagatcgcgttttgctggacaaaaggggtgcaaatcccatgggagaagctttatcaaggaaaaggtgcccgcagaataccgttgccaacctatccatttgaaaagagaagctgctggaacggctttcaagcagtagagaatacgccttctgtttcacaggatgagcgtatcaacaacagcagcgatcatcacatattagcaaatgtactagggatggttccgggtgaactgcagcctcataagccattgcagcagtatggatttgattcaatttcttgcatacagttattacagcaattgcaatcaaaggtggaccctctcattgccttgacggagcttcaagcatgccatactgttcaggacatgatggacttgatcgcaaagaaaaaggaggatacatccttacaaaatgatcaagctcgcacgtttccggaattaataccgttaaatgacggcaagcgggggcgccctgtcttttggttccatggcggagtaggaggagttgaaatctatcagcaatttgcacaaaagagccagcgccctttttacggcattcaagccagaggattcatgactgattatgctcctttgcacggaattgaacaaatggcttcctattatatagagatcattcgatccatacagcctgaaggtccttatgatgtaggcggatattccttaggcgggatgattgcatatgaagtcacacgccagctgcaaagccaaggccttgctgtcaaaagcatggtgatgattgactccccatatcgttctgagacaaaagagaatgaggcatctatgaaaacgtcaatgctgcaaacaattaatacgatgctggcatcgattgcgaaacgggaaaagcttacggatgttctcatcagccgtgaagaggtggacataagcttagaggatgaagaattcctggctgagttgattgacttggcaaaagaacgagggctaaacaaaccagataagcaaatacgtgcgcaggctcagcaaatgatgaaaacacagcgcgcctatgatttggagtcgtacactgttaagcctctccctgatcctgagacggtaaaatgttattatttccgcaacaaaagcaggtctttctttggtgatttagacacttatttcactttatcaaatgaaaaagaaccgtttgatcaagctgcctattgggaggaatgggagcggcaaattcctcatttccacctggtggatgtcgattcaagcaaccacttcatgatattaaccgaaccgaaagcgtcaacagccatgttagaattttgcgaaaagctctattcaaacaggggagtagtgaatgcgaatttccttaaggctttccggaagaaacatgaagcgagggaagaaaaagaaacagatgaattggtgaagcgctgagaaaacacaaacgccccctcttttaaaagggggcgttttgaatgttattttgaaagtgaaacagggagactttctaatcctcttaaaaagacattttttctccattgaatgtcatcaggtgcaaccgcaagttcaatatcaggaaatctcttcaaaagtgcgttaaatgcaatgtggccttccagcctggcaagaggcgctcctaagcagaaatgaatgccaaaaccgaaagaaatatgtctgttaggcgaccggtttatatttaatatttcggggttctcaaaaaaattcgggtcgcgattggcagatccgatccctataaaaatcatgtctcctcttttgatcgaatgccccttatatgtaaagtcttcgatggcccaccgatttgccatcataacgacaggtgaggtgtatcgcagcaattcttcaaccgctgtagcgatcatttcaggctgctgcttgagcttctcacattccttcttgtgctgcagcaatgcgagggtgcctgagccgagtaagttaacagttgtttcaaggccggctacaacgagcaagaacagcatcgaatagagctctttttcgcttaacttgctgccgttttcctcagcatgcacaagtttgctgattaaatcgtcttttggctttattcttctgtcatggatcagcttggcgatataatctttaaattcacgaagagcctgatttgtcagctctctattaccttcagaggtatcaaccatcgcattggtccagatttgaaactgtgaccgatcttcttttgggattcccatcaattcagatataacaataaaaggcaaaggggaagcgaaggatttcatgatatccgctttattttctttttccatttcatctaaaagctgttcagcaatttgttcaatgctgccgcgcagattttcaatggttcggggagtaaatgcttgatgaacaagtgatctcaggcgggtatggtcaggtgtgtcttttgccagcatatgatcggatacaaaatcgatatcttcactaacgttgagcattttgatttgttcttggttcatcacattttttacgtctcttgtaattcgattgtcttttaaaaaggccatacaatcatcgtatcgggtaattaaccaggccggatatgtggctccgaaccgttttaattcaaatcggtgaatgggctcttcctctctaaatcgtcctaaaactgaaaaaggattgtgatgaaactctttaccatgcggatgaaacatcaatttttccatttgcattctcctcgcctaatagggtaaatagatgaatcaaattgctgaattagtttacaaaaaacagaatgatttgaaatgtaatcctgtctctaaaactatatatctatcttaggcgtcattcaatagggagaagaacgaaaaaagtgaaaaaacggctcgatataaagcagcgcctttgaacgaaagctcaaaggcgctacgctgtattattttgatgaaagtggctgtcagctgtgctggatatcaattgtatatactgcacgatctgttacgaccttcaatccttcgttttcttggtgaatatgaagctcacctaataaaggaatctcataggcattttgcggaagcggtacgtttccgtcctcagtgaatgttgttccttcgccttctaaaacaagctcttctttcgcaacataatcatcaggatgattcgtactgcgtatagccactttttgaaggtggagaacaatctgatccaagtctgatatctcttcatcatgggtcaattcaccttttctaatatcaagcgtctggccgacttttgattccagccattgagaaagctgtgtattcgtgtgtgccatcaatattcctccttttgatctacacgatactattcccaattgctgcatcttttacacgggaaagagccgccccactctttatgtatgaaacagttcgctgttgagtgccttgatatagcgtacggcagaacgctggaccgattcgtcggcattttctttgacaactttagagaaagcattgtaaagccggttgaattgaagcggttttactttggctgctatttcttcaactttggaggcgggaaggggaatgagatttgggtagctgtacataaagctgacccagtttcgatccgccgcaaccgtaatgatatctccggtcaatagacagcctttcccttcattgcccttgctccaatgcaaaacagcaccgcctttaaaatgtccgcccagtcggtaaaggtccagtcccggcttcatattgagcgtttcccctgaccagaagtgaatgtgattgcttggccttgtcacccattctttatcatcctcatggatatagatcggcgcctgaaacgcttcagcccactcaacctgagtagagtaataatgtggatgagacaaggcgatggcttgaataccgcctaattcgttgatttggtcaattgtcttttggtcaagatatgtcatgcaatcccacagcacattgaagcccttatgctggataagatgggctgtttgtccgatcgcaaactctggttcagttttgatgctgtaaagatgctcttcttcctttttaaggatgttttgaaggtttcctttctcacgcatgtcttcaagggttgtccaagtttgtccatcgggatgaatatactgtctttcatcctcgcaaatcagacacgagttgggcggatctactgtctgtgcatgttgcacaccgcatgtgttgcagatataataaggcactttcttcacttccttcatctattttccattattttaccttatgattatgaatattcaaacaaaaggccggcagttctgctgagagagaattgccggcttttgatgatgtttattggccgggaacggaattttctgcgttgacagcgcccgctccgtagatattcggatcttcatctttccatttgtccgtgccgtttttcaaaagctcttttacttcatcaggggtaagatccgggttttgctgaagaattaaagctgcgattcctgcgcaaatcggtgttgccatcgaggttcctgacattgtaaagtactgagaccctacacggcttgacttttggagcttatcaatataagaattcggagagcgaagggaaataatattaacacccggcgctaaaatatcaggcttttctttcccatatactgtcgggccgcggcttgagaaggaagcgacagtatcatcatcgctgcttgcagtattgttatcgtcaagcgcacctactgtaatcaccttttcgctcacgcccgggcttgcaatggtctgcgaatcagggcctgagtttccggcagcgacacagacgacaatccctgcgctccacgcttcctcaaccgctctgactaacggatcttcctgttcatgatcatatctaagggcatcgcccccgagcgacatgctaataatatcaatcggttcatcggggttgtcctcattgtattgaatacaccactcaacaccctctataatatctgctaacgttcctgaaccctgcttgtttaatacctttacgccaatgagattggcttccggtgcagggccgcggtattgaccggaagaggatgcgccgctgcttgcgacatcacctgcacagtgtgtgccatgaccattatcatcgtacggctctgttttttgattgaccatgtccgcgaatccgataattctgccttctagatcaggatgcgggtagattcctgtatcgacaacagcgacagtaacaccttttcctgtcagggtttgaccgtttctgacgacttccttcgcatggcttgcttcggttgccgtgtctaaaagcgctttgacttcgcggtttaaatacactttacggatattgctgcattcagagagaagggaatgtaatgctgaaggagtaacttcggcgctgcagcagttgattttgttgaagcggctttttagcttgctgcgtttttctttttgcagcacctctccagctatttgaaggccggtctcgtgacagccttcctcaaattcgataatgactgacattttttttctgttttgcaatttggtttcgaaaaatttatgcaagaagcaaggagtccatttgaagggcttgtaaagctgcaatacggtttcccgtaacggccaatctagcttgtgagcatttgctctcaccatttgtaccatagagtacccaaacatgtattttcctcctattataaggttctctgtatactctatgaacagatgataggtttggtaagtttgtttgtcctctgtaagagacagacaagagtttgtttttctgaatctttcgcattagatacgatagattcagaagctgaggaaatcattggggattgaaaaagaacgtttgttcgtattataatgtgatcatatcaaactgggaaggggagagcaaccgtatgaatttctacttgcaccgatctttggaaagccaaatgccaatcagcattatatatatgaagaaagacggaacgattagtaaaagaacgattattgtgagacagaaaagcaaaacgaaaatcaaagcattttgtttttcgaaacaacaaatcagaacatttttattggactctatcctctcctgtgactttgtgagaacaaataagcaaaatctctattctgcaggccggtaacagctgtccgtctcagcaaccgggcagcctgttactaaaaccctccttaaacctatatacatttatttgccaagtgaggttgttcctaccttttttgtctttcctctcaaccttttttcactcttatttgaaatgaaccgctaataaccgtgacaatcaattgattttttgaaaccgggaactttttcactgatgatattgtgtatacaatggtaagataaaacctattggctaaacctcatataatgaaccgcgccattcttatgaaaggagttaaacatgagaagatttttactaaatgtcatattagtcttagccattgtcttgttcttgagatatgttcattactcattggaaccagaaccatcaaatcagccagatacatattcaaatttcagcagcttggcagagaatgagagcccagccgattacgatatttcatataatgagaaaaaaggaagcaaagtcttaattatgtctccgcatggcggaagaattgaaggcggagtaagtgagcttgtgcgttatttcaataatgaatactctacatacctatttgaagggttgaagtcccatgataaccaaacactgcacattacaagcaccaactttgatgagccattggcaaaaaagaaaatcaaggagcatcaatatgtggtggcttttcacggatataaaggagagaacaagaatacccttgtagggggaacagaccgaaagcgggcgaaaatgattgtgagagcccttgagcggagagggttttccgctgagttagcgtcgtctaaaagcggtcttgctggattgaatgccgaaaacattaataaccaaggggaaacggggctaagtatccagctggaaatcagccgtgagcagagagaagcattttttgatgatttttattataaaaatagaaaatacacaaagaacagtgaattttatgcttatgtcagtgcgatcaaaggtgtcctggaaaaagagtattcgtaacaagcagatcagaagacaaaataagagaagatcagtagactgaaataggataaaaaaggaggcaaaacaatggcagatcatcatttttatttaaaagcgaactggccgggtaaccgtaatgatgtcggtacgatcgaaagcggaaacctgatcacatcgatttccattcctaaagaaatggatggcccgggagaagggaccaacccagatgaaatgcttctcggggcggcagcgacctgttacattattacacttgcagcgatgatggagagaagcgggctggaaaaagaagacttacagatggagtcagaaggcattgtcaacgttacaaaaggagtctttacatacaaaaagatcattcaccgtccctctgtcgtgcttaaacatgatgcttcacaagacgacgtcgcattggcgcacaaactttgtaaaaaagcggagtcgtcatgcatgatttcgcgtgcaattcaaggaaatgtcgagctgcagcttgaagcctctgtgaaactgggttgagaataaagaaaacagacggtcactcacaggccgtctgttttttatcttcagcgtgggctttcgattgatttagcacgaccacgcctgcaatgacaagcgtgagaccgaatacaccttttaaactgatggtttcgccaaaaagcaaaaacccgacaattgctgtaagcgcggtaccaacgcccgaccatgttgcatacgcgcttgataagtcaattgtttttaaagaaaagcttagaaacgtaaaagcagaaagaaatccgactatgactccggcaatgggccaggcttgtgtaaatccttctgaaagcttcaacatcgtgctcccaaacacttcagatacaatggcgagagccaaataaagcaatcctctcatcttcatcactcctttacggccaattaagtaacacgacccctgatagtaataaaagaatcccgataagccctttggcattcagatcttccttgaaccattttactccgatcactgtcgtcagcaccgtgcctgccccgctccaagtcgcataggagaggctcaggggaatatggtttaaagtcagggacagcatataaaaggcgagggaatagccaataacgaccaaagcacttggcttccactttttgaagccatcagatactttcagcatggctgctcctatcgattccgaacatatggcaatcgtgaggaatatatatcctatcaacatcatgaattctcctcactatatttttagattagaaaaaaacttcagctagaaaaatattagtgtatgcctatgtatgagtcaagagattcattttcacacacttaaaaagacccctttttaaggggccttttgcgtttaataataataagggaacggggcatacggataataggggtatccgccatacaaataaggattaaataaagcgcttcctataagcccgcctgcaaggccgccgataaacggtcctccaaaaaatccgaatggccggccaaacccataaccaaatccgggtcttccaaatccgtaaccgaacccgaacggtcttccaaacccaaatggtctcccgaatccgaacggtcttccaaatattcttgtatcttcagggctgaaatgctctaactcgttcatgttttctttcctcctgtaataaagtgtagatgatgcagtgtattcaccctgcccggatttgattgggcgaatcgaggaaaaggaggatgtgaacacattgggcctgtatcagtctgactggtcaaaagcaccgccccacgcacatgcctatcatgtcaaaacaacgagagaacagggccattatcatctcattgaagggtttactcagccggcaaacggatcaaataccgatcagcatacacattactatacagggatcacttcatttgaaaacggccattttcatcggtattacggaatctcagggccggcgattcccttagcagatggcacacattatcatgaaatcgaagaaacgacatatctggcctataacgagccaattgagatccagtacggaggggttgtgtacgatcccggagatgacagaagaaaaacgcatcgtcataccctgaaaggaaagacaagggaaattgtcggcaatgagccgctcggctggtagaaggatgtttaccgatgcaaaaaaagggcaaaatggataggtggttgtccatgttgaatgctataatgggggggagatttataaaagagagtgatacatattgaataatacgaagcagcccgttgtcattttagtcggaccgacggcagtggggaaaaccaatttaagtattcaactagccaaatccttaaacgcggaaattatcagcggagattcgatgcagatttataaagggatggatattggaacagctaaaattaccgaacaggagatggagggagtgccccatcatctgattgacattttagatcccaaagactctttctctactgccgattatcaaagcttagtaagaaataaaatcagcgagattgcaaatagaggaaagcttccgatgattgtcggcggtacagggctttatatacaatctgtgctttacgattatacatttacggaagaggcaaatgatcccgtgtttcgagagagcatgcaaatggccgctgagcgggaaggcgctgactttctgcatgccaaacttgctgcagcagatcccgaggcagcagctgcgattcatccgaataatacaagaagagtcattcgcgcactggaaattttacatacgtccggaaaaacgatgtcccagcatttgaaggaacaaaaacgagaacttctgtacaatgcagtgttaattggcttgacaatggatagagacacgctttacgaaagaattaatcagcgggtcgatttgatgatggagtcaggccttcttccggaagtgaaacgcttatacgacaagaacgtgagagactgtcaatcaatacaggcgataggctataaagagctgtatgcatattttgacggttttgtgacactttccgatgctgtcgaacagctaaagcagaactcgaggcggtatgcgaaacgccagctgacgtggtttcgcaacaaaatgcaggtcacatggttcgatatgacaccgcctgttgatatggagctgaaaaaaaaggaaattttcacacatatagcaggaaaactcgaactttaatcgaaactgtatgatatagagaatcaaggaggacgaaacatgaaaccgattaatattcaggatcagtttttgaatcaaatccggaaagaaaatacgtatgtcactgtttttttgctgaacggctttcagttgcggggccaggtgaaaggctttgataactttaccgtattgttggaatcggaaggtaagcagcagcttatatataaacatgcgatctcaacgtttgcgccgcaaaaaaacgtccagcttgaactcgaatagatcaaaaaatgccatgtcaagacatgaggaaaggctgccgggggttcccggcggccatttttaacatgaatccacttttgctccaagctttttgtgtaagctgaccatgccaaggcacggtctttttttatgagaacaacatacggaagtgaaaatggtatattatgtataaaatgaatttgggagtgatcgaccttgtttgaaagtgaagcagaactgagacgaatcaggattgcacttgtatggatagctgtctttttactgttcggggcgtgcgggaatcaagataccattattgaaacagacagcggcaattcagactatgaaacgcctcagcccacctcgtttccacttgaacataaccattttggcgttatggaggacggctatatcaaaatttatgagtataatgagtcccgcaatgaggtaaagctgaagaaagaatacgcggatgatgagcttgaataaaattcacaagcattcgaatttacaaagcggattccagccgctaaactaaatacagacacagatcaaacagagggtgaaaacatgaagcataaagtgatcgtgaatcattgggaagaaatttgcgaagatgattcttgctatgaatacggaacaagtatcattgtgaacggaaaagaattaatcagagaagcgtcaattatcactgctttgaaggcggttttagaagagatcggcgcggatgttgaaatagaagaaacagtagagagcgaaaaatgctgtgatagcttaagaaaaaaaaatctagactactaagcagttttttttcatgttatgataaacatcggctaaaaaacgacaccccgagtaggatgagagatgattctcgttctgctctcttttttgggccctaatgagtctgcccatttgcctgatttgatcaaaatatgaatttttcataaaaacgaatctatatattgtgtttttgctagagggtagtatactgtatatagtgttagtgatgagagattcatattttttgataggtcgtgataaaacgtggtacaaatcatatttgattcgaaaacagggaatgttcagcggtttgtgaataaaacaggctttcagcagatacgcaaggtggacgaaatggaccacgtggacactccgtttgttttggtcacctacacgacaaacttcggccaggtaccggcatcaacacaatcatttctcgaaaaatacgcccatctcttattaggagtcgctgcgagcggcaacaaagtatggggcgataactttgcaaaaagcgccgataccatttcaagacaatatcaggtgccgatcttgcacaaatttgaactcagcggcacatctaaagacgttgaattgtttactcaggaggtagaaagagttgtcacaaaatcaagtgccaaaatggatccagttaaataacgaaatcatgatccaaaaagatggaaaattccagtttgataaggataaagaggctgtacatagctattttgtagattatatcaatcaaaacacagtcttctttcacgatttaaaagagaagctggattatttggttgaaaaccaatactacgaagaggaattcttaagcctttattcttttgaagacattaaagaagtgtttaagacagcttacgctaagaagtttcgttttccttccttcatgagtgcgtttaaattctataatgactatgctttgaaaacgaatgacaagaaaaaaatcctcgagcgttatgaggaccggatctcaattgttgcgctgttcttcgctaacggcgacactgagaaagcaaaagaatatgtaaacctgatgatcaatcaagaatatcagccgagcacaccgacatttctgaacgccggcagaaaacgccgcggtgaacttgtgagctgcttcttgctggaagtcaatgattccttaaatgacatttcaagagcgatcgatatctccatgcagctttctaagcttggcggcggggtttctcttaacctgtccaagcttcgcgcgaaaggtgaagccattaaagatgttgaaaatgctacaaaaggcgttgtaggcgtcatgaagcttcttgataacgcgttccgttatgctgaccaaatgggacaaagacaaggctctggcgcggcgtacttaaatattttccaccgcgatatcaatgattttctcgatacgaaaaagatttcagcggatgaagatgtgcgcgtcaaaacgctttcgatcggtgttgtcattccggataagttcgttgagcttgcacgcgaggacaaagcggcttatgtattctatccgcacacgatttataaagagtacggccagcacatggatgagatggacatgaacgaaatgtacgacaaatttgtcgacaaccctcgggtgaaaaaggaaaaaatcaacccgcggaaattgcttgaaaaactggcgatgcttcgttctgaatcaggctatccatacatcatgttccaagataacgtgaataaagtgcatgcgaataaccatatttccaaggtgaaattttctaacctttgctctgaagtgctgcaggcatctcaagtttcttcatacacagactatgatgaagaagatgaaatcggtctggatatttcctgcaacctgggttcgcttaacattctcaatgtcatggagcataaatcaatcgaaaagacagtcaagcttgcgacagactctttaacacacgtgtctgaaacaactgacatccgtaatgcgcctgctgtaagacgggcaaacaaagcgatgaaatcaatcggcctcggtgctatgaaccttcacggctaccttgcgcaaaacggcattgcgtatgaaagtccggaagcgcgtgactttgcaaacacgttctttatgatggtgaacttctactccatccagcgttctgcggaaatcgcaaaagagaagggtgaaacgtttgatcaatatgaaggctcaacctatgcgacaggtgaatactttgacaaatacgtttctactgatttctcaccgaaatatgaaaaaatcgctaatctgtttgagggtatgcatatcccgacgacagaggactggaaaaagctaaaagcatttgtggctgaacacggtatgtatcacagctacagattatgcattgcgccgacaggctctatctcatacgtccaatcaagtacggcgtctgttatgccgattatggaacgcattgaagaacgaacatacggcaactcaaaaacgtactacccaatgcctgggcttgcatctaataactggttcttctataaagaagcctacgatatggacatgttcaaggttgtggatatgatcgccactatccagcagcacattgatcagggaatcagctttacattgttcttaaaagacacaatgacgacccgtgatttaaaccgaatcgatctgtatgcacatcatagaggtattaaaaccatttactatgcaagaacgaaagatactgggcaagacagctgcctttcttgtgttgtttgattaaaggagagtttatagtgacaaaaatttatgacgcagcaaactggtcaaagcatgaagacgattttacccaaatgttctataaccaaaacgtgaaacagttctggcttccggaagagattgctttaaacggcgatctcctcacatggaagtacctcggaaaaaatgagcaggacacttatatgaaggtactggccggacttacgcttcttgacacagagcaggggaatacggggatgccgatcgtggctgaacacgtagacggccaccagcggaaagcggtgctgaactttatggcgatgatggagaacgctgtccatgcgaagtcgtactctaatattttcatgacccttgcaccgactgaaacgattaatgaagtatttgaatgggttaaacaaaataaatatttgcagaaaaaagcgcaaatgattgtcgggctttacaaagccattcaaaaagatgatgaaatttcactgttcaaagcgatggttgcttccgtctatctggaaagtttccttttctacagcggtttctattatccgttatatttctacggacaaggaaaactgatgcaaagcggtgagatcattaacctgatccttcgtgacgaagcgattcacggcgtgtatgtcggtctccttgctcaggaaatttataataaacagacagaagagaaaaaagcagagcttcgtgaatttgcgatcgaccttctgaatcagttatatgaaaatgagcttgagtatacagaggacttgtacgatcaagtcggactctcacacgatgtaaagaaattcatccgctataatgcgaataaagcgctgatgaatcttggatttgatccatacttcgaagaggaagatattaatccgatcgttttaaacggattaaacacaaaaacaaaatcacatgacttcttctctatgaaggggaatggttataaaaaagcgacagttgagccgctcaaagatgatgacttttattttgaagatgaaaaagagcagatataatatctgctcttttcggcttgaaggttcaaatgaggaggacgcagtacccatgggaaaaatggacgaaatgattttagttgccccacgcgatgatgtgtttaaaaaagaaagcttaaccttccagggcgtgtacagtgaagatagcagagtagccgaaatcatggctcagattgaagcggcctatcgtgaaatgagaagaggggacgcagaagaagatccgcgtttcaagcagccgataccttatgtcgtcattaagcgtgaagatgaagtttttctttacgagcggctggctggcggcggtgaatcacgactgcacaacaagctttctctcggctttggcggtcatatgaacgccatcgaaggggcagcttcatttgctgaagtcttaaagctgaacacagaccgtgagcttgaggaagaactgcaaataaatgaagaagataaacaggcgattgtcacactgggattgatcaatgatgatgaaaatagtgttggcaaagtgcatatcggtattctttctgcgcttcaattaaagcctggcgcacaagtggaagtgaaggagaaagaacaaattgcgggtaaatggatgaaagtttctgaattaaaacaggatgacatctacaaccgtctggaaacatggtcacagtttgttgttgatattcttgaataaaaaaacccggtttctcgcgatgaggagccgggtttttttatgagacgctcgtccccgtctcggctatgattctaggatcacaatagcgtcaaagccggcatttttcgctctggcagcgagagtgtctgcattgtcattggatgaaaatgcgccaatctgcactttgtaaaatccgtcctttaaaaggacaatcgagtcaaaacctttggcttcggcattacttgcgagcgagtcggcattcgctttggctttaaatgcgccgatttgaaccttatataaccctgagctggaagtctttttaaggttaaaggcttgctccagcccgtttgcatgtcctctcgctaagctttgaataaaactgctcgttttcagcttatttgcatcggaaacggtatcaatgaagccgttctcggtcaagagggcaggcattgccgactcccttaggacgtggaagttcgctgtttttttgccgcgatcggcaaagtcgacagcttgtatcacttcagagtgaattgccgattgataagtcgtcgtcggggctcctacatctggataaatatagctttcaaaacctgtgcctcccccggaattaacgtgaatggacaaaaagaaatctgctccccagttatttgcggcatttgtccggtcgtttaagctgacatattggtcgcttgtccggctcagcagcagagaaacgccttcatattcattagttaatatcgtacgtaaggctaaagcgatttgcagggttaacgttttttcctgaaggccattacctgttgcgcctggatcagacccgccatggccaggatcaataaaaattttaaccatttttcatcacctcattacaggatatgaaaaaacacagcttctgcttgtacgattatcattcaactgaaaaatgaggaaataaccctttcacatccagaaattatttctcgggaaagcgcacaattcaacatgaagcgacaacagatacggtccgacatgaaatctgtgcatacgccatatgtttgtatgtactttgagttcggttaacctgcactgattcctgttggttttaagctttgcgttcatattaaatcaagcatttgaaacgtaaattgatgagaaaagctcctttcattaaagacaccactttataaatcgaaaaaaagaaaaacacttcaggtatcttagggcgggtaatacgcttcgtacaaaaaacagcccgttgcatgaaaaaaggattggcgaatggagaaaataatgagaaagaagctcactataatactttgacaaaatgattaaaaacaaaatctcatggtttgtccaccccatgtccgtgaatacaataagaaataaagtatttctcgggaaagcgcaggattccttattgttcccgaaaaaagcaattgtttcgacacatgataggcgtttgtcacaatcggcatccgcttgaatatcatatagagagaacagagaggtgaagatgttggagcgcgctgtgacttataaaaacaacggacagatcaacattattctgaacgggcaaaagcaggtgctgacgaatgctgaggcagaggcggaatatcaggctgcattgcaaaaaaacgaagcaaagcacggcattttgaaggaaatcgaaaaagagatgagcgcattagttgggatggaggaaatgaaacgcaacatcaaggaaatatacgcctggatttttgtgaaccaaaaacgcgcggagcaaggcttgaaggttggaaagcaagcgctgcacatgatgtttaaaggaaatccgggaacgggaaaaacgacggttgcacggctcatcggcaagctgttctttgaaatgaatgtcctgtcaaaaggccacttaatagaagcggagcgggctgacctggtcggggagtatatcggacacaccgcccaaaagacgagagatttaatcaaaaagtcattaggtggcattttgtttatagacgaagcctactcgctggcaagaggcggcgaaaaggactttgggaaagaagcgatcgacacacttgtaaagcatatggaagacaaacagcatgagtttattttgatactcgctggatattcacgggaaatggatcattttctctcgttaaatcccggtctccattcaagatttcccatctccattgattttccggattactctgtgacccagctcatggagattgcgaaacgaatgatcgatgaaagggaataccagctcagtcaagaagcggaatggaaattgaaagattacttaatgacagtgaaaagcacgacaagccccattaaattcagcaatggacgttttgtcagaaatgtgatcgaaaaatcgatcagagcacaagccatgaggcttttaatgggagaccaatacttaaaaagcgacttgatgaccatcaaaagccaagatctttccattaaagaagaagcatctggatctgcatagacctctcagtttttgagaggtctgttttttgctcgtatttccgcttttcaaagcaatcgatttgtggtatacacatgcagggtttggtatgataatactactgcccaatatgcaaaagaaaggaacatccatttgaacgaacaagaaacgattcaggagaaagccattttagtcggatgtcagctgccgcatatcacggatgagcattttgaaaattctatggaagagctagcatctctgacgaaaacagcagacggaaaagtactgaccagcgtcacacaaaaacggaacagggctgacgccgctacatatataggaaaagggaaggtagaagagctgaaggcactggtggaagagcttgaagctgatctcctcatctttaatgatgaactgtcgccaagtcagctgaagtcattggcaacagcaattgaagtgaagatgattgaccgcacgcaattgatattagatatttttgcaaagcgggcgagaacgagagaaggcaaacttcaaattgagctggctcagctgcaatatgcactgccgcgtctgacgggacaagggatcaacctttcccggcaaggcggaggaattggggcaagaggtcccggggaaacgaaactggaaaccgaccgccgccatatcagaaatcgcattcatgaaatcaacacacagctttccactgtcattcgccatagaagccgataccgtgaaagaagaaagaaaaacggtgtgcttcaaattgcgcttgtcggctatacaaacgcagggaaatcaacatggttcaaccgcctgacgagtgctgacagctatgaagaagacctcctgtttgccacgctcgatccaatgaccagaaaaatggtcctgccaagcggctacagtgttcttctttcagatacagtaggatttattcaggatcttccgacgacattgattgctgcattccgctcaacgcttgaggaagtaaaagaagcggatttgatcctgcatttaattgattcttcaaatgaggattatgcgggacatgaaaaaacagtgcttgggcttctcgaggagcttgaagcagatgatatcccgatgctgacggcttacaataaacgtgatcaaaaactgcctgattttataccgtccgccggaagggatcacattatggtcagtgcgaaatttgaggacgacgctgcagcctttaaagaagcgattcagcgctatttgcgccaagaactgttaacgtcttttgaagcacatgtgccggcaagtgaagggaagctcctttccagaatcaaatcggaaacgatgatagaccgcttctattttaatgaagaaaatgaacagtatgacatatccggctatgtccaagaagagcaaagtatcatcggtgaattaaagaagtatatgtaggaaggaaaaataaagacatgtttgacacattaacacacggagaattattgaagaaaacggcaatggaagtggaagcggacattgccggcattcataaacaaatagaagaaatcagcgagcgaaatgagtggagagtgcttcaaagctatagaaaacacaaagtaagcgacactcatttcacgccgtctactggatacggctatgatgatatcggaagagacacgcttgaaagcatatatgcggatgtgtttggcggagaagcggggcttgtaaggccgcaaatcatttcaggcacacatgccatctcaattgctttgttcggtgtcctcagaccgggggacgagctcctttatatcacgggcaagccgtatgatacgctagaggaaattgtgggcgtcaggggtggagaaaacgctggttcgttaaaggattttcaaatcggctataatgcggttgatctgacgaaagacggaaagatagactatgatgcagtcgccgctgcgatcaatccgaagacaaaagtaatcggcattcagcgctcaaaaggatatgcgaatcgcccttctttcttaattagtgaaataaaagaaatgatccgttttgtaaaagaaatcaatgaaaatctgatcgtctttgtggacaactgttacggagaatttgtggaagagcttgagccttgccatgtcggagccgacctgatggcgggatctctcattaaaaatcccggcggcggccttgcgaaaacaggcggctacctcgtcggaaaagcgaaatggattgaagcttgctcataccgtatgacgtcacccggcatcggcagagaagcgggggcatctctttactcgctccaagaaatgtaccaaggcttctttttggcgcctcatgttgtgtctcaaagtctaaagggagcggtgtttacagcgagattccttgaaaaactcggcttcacttcaaacccgaaatgggatgcgaaaagaacggatttaatacaatccgttgagttttctgacagagaaaagatgattgctttttgccaggctattcaatttgcatcgccaatcaatgctcatgtgacgccttatccagcctacatgcctggatacgaggatgatgtcattatggcagcaggcacgtttattcaaggagcaagcatcgaattatcagctgatggccctatccgcccgccgtatgtagcgtatgttcagggaggattaacctattcgcatgtgaagaatgccatatgcagtgcagtggattcattgatggaaaagcaattaatttaaatttttaaaaatttctctggatttgatgttaagaatccttacatcgtattgacacataatataacatcacctataatgaaactaagttaagaaaaggaggaaattgagatgagtgataatattcgccgctcaatgcctttatttccaataggaattgtcatgcagttaactgagttatcagcaagacaaattcgatattatgaggaaaatggactgatatttccagccagaagtgaagggaatagacgattattttcatttcatgatgtagataaactgttagaaatcaagcacctgatagaacaaggtgtaaacatggcaggaattaaacaaattctggcgaaagccgaagccgagccagcacaaaaacaaaacgagaagacgaaaaaaccaatgaaacatgatctgtccgatgacgaactgagacagctcctgaaaaacgagctcatgcaagccggccgttttcaaagagggaatacattccgtcaaggcgacatgtcccgcttctttcattaatccgttagcaactgttttgctatatacatttaccttttaagaggaggaattttaccaaatggcaaagtacactagagaagatatcgaaaaattagtaaaagaagaaaacgtgaagtatatccgccttcaatttactgacattcttggaacaatcaagaatgttgagattcctgtaagccagcttggaaaagcgcttgataataaagtcatgtttgacggttcttctattgagggattcgttcgtatcgaggagtcagacatgtacctgtatccagatctaaatacatttgttatcttcccatggacagctgaaaaaggtaaagtagcacgtttcatctgtgatatttacaatccggatggcacaccttttgaaggtgacccgcgaaacaacttaaaacggattttgaaagaaatggaagacctcggatttagtgattttaaccttgggcctgagcctgaattcttcttattcaaattggacgaaaaaggcgagccgacgcttgaactaaacgacaaaggcgggtatttcgacttagctccaactgatttaggagaaaactgccgccgcgatatcgtgcttgagcttgaagagatgggctttgaaatcgaagcatctcaccacgaagtagcacctggtcagcacgaaattgactttaaatatgctggagcagtccgctcttgtgatgacatccaaacatttaaactagttgtcaaaacaattgcccgcaaacacggcctgcatgcgacatttatgccaaaaccattgttcggcgtgaacggttctggtatgcactgcaatctatcactcttcaaaaatggtgttaacgcattctttgatgaaagcgcagatcttcagttaagtgaaacagcgaaacacttcatcgcaggtatcgtgaagcacgcaacaagctttacagcagtaacaaacccgacagtaaactcttacaaacgtcttgttcctggctatgaagcaccttgctatgtagcatggagcgcgcaaaacagaagcccgcttatccgtatcccggcttctcgcggcatcagcacacgtgttgaagtacgcagcgtagacccagctgcaaacccataccttgcacttagcgtattgcttgctgcaggattagacggaatcaaaaacaaactggaagcgccggctccaatcgaccgcaacatctatgtgatgagcaaagaagagcgcatggaaaacggaatcgttgaccttccagcaacacttgcggaagcgctagaagaattcaaatcaaacgaagttatggtcaaagcgctgggcgagcacctattcgaacacttcatcgaagcaaaagaaatcgaatgggatatgttccgcacacaagttcatccttgggagcgcgaacagtatatgtctcagtattaatctctcaatcccttggcactaaaggtgtcaggggattttttatgttaataggtaataaattatggagcggcactgctaaaaagcagggtcacttttagtctatgtcactaataattctatgtactaaattttcaattagggaaataattccacgcttaaggaagcaatacgcataaataattcgacaaattctgtgataattccattgttcaatacttctaccagcaataataagatgagcaaggtggatgattatcattgacatcataaccaaaaaaatccataattacgttgaaatctaaatcaattttcaaaaaggagatttccatgaaaaaattgactatcttttccgggggattaggagtggttttttctgtactggctcaactgtttgcggttatagatgactcttacactttggggaatttatggtttttaggtgctttggcgggaattataaccatgcttgcttcaatccagacaaataataaaccaatcttcagcattttattaatttctagttcagtaataggtctacttggaactggttttgtatacatcataccaacactgttcaatataataataatttataaattttcaaaagtaagccaataagccaatgggaaaattaaggttctttttttatttaacatccctttgacaaggtcggtaatgaatcgcagaatgttgcaactggtccacacagttggggaaatcgtgggcatgattatcgaacgccatgtttctaggataccggaattgaaacatttgctgagtcatttcgtgaagttgatcaccaaatgtccatttcaatagaggcacgtctaaagaagctatcataggaggacaatactgtgtggaaagctttaagtcaattactcaagaaacagaaaaatcaaagtccaagcgatgagggttatatacagattccagaaaaggatataaatcaagaattaaagcaagtgatatttgagttggagagcctgggggaagtagtatcgaaaaagctgcagaataagtatgcaggtgtttttgaagctcaggataaaccaaatctcagcatcaaagtttgtagagacatagatggagatgtgctaaatgattttacagctgagagatgttttgaaaaagaataccgttcacaaatagcaattaattactatcaacctgcaatagtctgtgatgaagaattagcctgtttcacaatggatttgtggtattactacggtggatataaagggacgggttgtggaacattattcgatttaaataataatgacttagaaaaagaaattgaagagacgctaatatttttgctcaatgacaaacaattcgagaaataaaaaagaaggccgcaaagcgctttcaatcaactgatgtagctaagaaaagcgtttaagaattagctgacttgggtgacagcgagttttccgggaagggtgcagacaacattaaagcattttatcatgatcatgccggcattacagatcaatgtatcgatcggattgacatggaaattgctttcttaagcatcatttttgcaaaacttgtagatgcaaagatgtaagatacttacatagaagagtcatttttaaaacatgagctggctaacgattacacaaaatcaaaattcattatgtctgaacaaaagaaaacgatgaaagacattctgaataacaccattgaataaatatcttaaggataaaaaagtgaattggtcaaaggaattgaaatatttaaaagggctattaggctccaaaacgcttgcaaaagatttaaaaatccaaatgaatgtttaagtatttgttttcaggtttagtgataactatgtctatacttaaaattatatccatttgataatccagagagaaaaaccttaatgtcccgtttaataggggaaagaactatgatatctcctagtcaccaatatataagaaatgggacaagcaaagatttgttaggcgcaactttaattaaataaataaaatagcaatcttgtgataatagtagctaatctgttggtacccttgccagcagcttttataaaacgtttttttgactttgagttgctctttcttagtctgataaaacttcttcattagcgtccgcttctcaatctaggatatgtgaaatcctcaatcgcattgcaaattcccgaaaagctttttctgtctttaaatcaagtccaaacttcattctctcggccgtctaagaagctaatttactgcttcttcttttcaggttccatgtaccggtctttacagtgtctgggagaaaaagtgatttggggcattcatctttttttatttcagctagcgaagtgaaagaccgatggcatttttcctgcatataatagctggaactattcaaaaaggcagggaatgaagttgagtgaatgatgtgattgtaaatggaggttttgaaacaggcaatctgacgggctgggcttctgcaaatacgtccgttattaatacttttgcccattctggaagatattccgcacagtttttcagtaaccagccgtatgcttttttagggcagatcgtgcctgtcgtttctggacaatctctgatattcatcgtttcgcttgggagaattggaaacaattcaagtccccaagtaactatacaaattttatttgttaacagtgaaggcgaagagattgaaggcggacaggaaattatcattgcttccggaaatttgccaaatgtctcatttaatacatggaatgaaatatatagaacaattgaaacccccgctgaagcagtaaacgcagtggtggtaataagcaaaactacttttgggtctgttctaattgatgatgtttctttaatagagtctgctgggggaattggaccgactggaccaacaggtgcaacgggagcaacaggcgcaacaggcgcaacaggcgcaacgggagcaaccggagcaacaggcgcaaccggtccaactggagtaacgggagtaacaggggcaactggtgcaaccggatcaaccggatcaaccggatcaaccggagaaacaggatcaacgggagtaacaggggcaaccggagcaacaggagtgactggatcaactggcgcgaccggagcaaccggatcaacgggatcaaccggagaaacaggtccaacaggaccaaccggagaaactggagcaaccggaccaaccggatcaaccggagttactggagcaattggagccactggcgcaacaggatcaactggtgcaacgggagtaaccggagccactggagtaacaggattaactggaccaaccggagaaactggtgcgacgggagtaaccggagccactggagccactggagtaacaggattaactggtgcgacaggagaaactggaccaaccggagcaacgggatcaaccggagtaacaggtgtaacaggatcaactggagtaacaggatcaacagggtcaacaggatcaacaggaccaaccggtccaacaggagtaacaggatcaaccggagaaactggcgcaaccggatcaactggagaaacaggagtaacaggatcaaccggatcaaccggagaaacaggtccaacaggaccaactggtgcaacgggagtaaccggagccactggtgcaacaggaccaactggtgcaacgggagtaaccggtccaactggcgcaaccggagcaacaggcgcaaccggtccaactggagtaacgggagtaacaggggcaactggtgcaaccggatcaaccggatcaaccggagaaacaggatcaacgggagtaacagggtcaaccggagcaacaggagtgacaggtgcaaccggatcaaccggagaaactggtgcgacgggagcaattggtgcaactggtgcaaccggagcaacgggagtaactgggtcaaccggagcaacaggagtaacaggtgcaaccggatcaaccggagaaactggtgcgacgggagcaattggtgcaactggtgcaaccggagcaacgggagtaacaggatcaactggaccaaccggagtaacaggtgtaacaggtgcaaccggatcaactggtgcaacgggagtatccggagccactggagtaacaggattaactggaccaaccggagaaactggtgcgacgggagtaaccggagccactggagccactggagccactggagtaacaggattaactggtgcgacaggagaaactggaccaaccggagcaacaggagtaacaggatcaaccggagaaacaggtccaacaggagtaacaggatcaaccggagaaactggcgcaaccggatcaactggagaaacaggagtaacaggatcaaccggagaaacaggaccaactggtgcaacgggagtaaccggagccactggtgcaacaggagcaacaggagtaatcggtccaactggcgcaaccggagcaacaggcgcaaccggtccaactggagtaacgggagtaacaggggcaactggtgcaaccggatcaaccggagaaacaggatcaacgggagtaacagggtcaaccggagcaacaggagtgacaggtgcaaccggatcaaccggagaaactggtgcgacgggagcaattggtgcaactggtgcaaccggagcaacgggagtaactgggtcaaccggagcaacaggagtaacaggatcaactggaccaaccggagtaacaggtgcaaccggatcaactggagaaactggagaaactggagatacaggaccaaccggagaaactggtgcgacgggagtaaccggagccactggagccactggagtaacaggattaactggtgcgacaggagaaactggaccaaccggagcaacgggatcaaccggagtaacaggtgtaacaggatcaactggagtaacaggatcaacagggtcaacaggatcaacaggaccaaccggtccaacaggagtaacaggatcaaccggagaaactggcgcaaccggatcaactggagaaacaggagtaacaggatcaaccggatcaaccggagaaacaggtccaacaggaccaactggtgcaacgggagtaaccggagccactggtgcaacaggagcaacaggaccaaccggtccaacaggagtaacaggatcaaccggagaaactggcgcaaccggatcaactggagaaacaggagtaacaggatcaaccggatcaaccggagaaacaggtccaacaggaccaaccggtccaacaggagtaacaggatcaaccggagaaactggcgcaaccggatcaactggagaaacaggagtaacaggatcaactggcgcaaccggagcaacaggcgcaaccggtccaactggagtaacgggagtaacaggggcaactggtgcaaccggatcaaccggagaaacaggatcaacgggagtaacaggggcaaccggagcaacaggagtgactggatcaactggcgcaacaggagtaacaggtgcaaccggtccaactggagtaacgggagtaacaggggcaactggtgcaaccggatcaaccggagaaacaggatcaacgggagtaacaggggcaaccggagcaacaggagtgactggatcaactggctcaacaggagtaacaggtgcaaccggagcaacgggagtaactgggtcaaccggagcaacaggagtaacaggatcaactggaccaaccggagtaacaggtgtaacaggtgcaaccggatcaactggtgcaacgggagtatccggagccactggagtaacaggattaactggaccaaccggagaaactggtgcgacaggagaaactggtgcgacgggagtaactgggtcaaccggagaaactggagtaacaggatcaactggaccaaccggagcaacgggagtaaccggagtaacaggatcaacagggtcaacaggatcaacaggaccaaccggaccaaccggatcaacgggagcaacaggagtaacaggagtaacaggtgtaacaggtgcaaccggatcaactggagaaactggagtaactggtgcaactggagatacaggaccaaccggatcaacgggagcaaccggagaaacaggagtaacaggatcaaagggagtaactggtgcaaccggagaaacaggagctactggtgcaactggagatacaggaccaaccggtccaacaggagtaacaggatcaacaggtccaacaggaccaaccggaccaaccggagaaacaggagcaaccggtccaacaggagcaaccggatcaactggagtaaccggagcaactggagcaaccggaccaaccggatcaacgggagtaaccggtccaactggagcaaccggatcaacgggagtaaccggtccaactggagcaaccggatcaacgggagtaaccggtccaactggagcaaccggatcaacgggagtaaccggagaaacaggagtaacaggattaactggtgcaacaggatcaaccggagaaacaggagcaacaggagcaacaggagcaaccggatcaacgggagaaactggcgcaaccggagcaacaggatcaacgggagtaaccggagcaacaggagtaaccggattaactggtgcaacaggagcaacaggagcaacaggagtaactggtccaacaggatcaacaggagtaaccggagaaactggtgcaaccggatcaactggcgcaacaggagcaacaggtgcaaccggatcaactggcgcaacaggagcaacaggtgcaactggcgcaacaggagtaaccggtccaactggagaaacaggatcaaccggatcaaccggagcaactggtgcaactggagcaacgggagtaactggagccactggtgcaacaggatcaaccggagcaaccggtccaaccggatcaaccggagtaaccggagtaacaggtgcaacaggaccaacaggaccaacaggaccaaccggttcaaccggggcaaatccacagctgttttacagtgaaatagcaggccccgttccgcttgctattaacggtactgaaacgtcgattggtactttaagtgtgccaacagtcgcaggacaattaataaaattagaccttgccatttctgtagatgttacaacgacagctaactcaaactttacttttcaaaccagaatttatagaaacggagtattagtagatacacgctccgtccaaagaaatatcagcgctgcaattacgtcaagatttccaattgctacaacgtatgtagatgctaccacggtcacaggcacgacttcttatgagattaggataatcttcacaacagtaagtaatgtgagtggcagcaacgcactaaacctagatataaatgctattaggttcccttaataatagagaattaaaaaatcacttttttaaaaaaattcaagcatatgaaacaagaaacctacttttaaacagtaggtttctttgtcgtggtattgaaaccttatcatgtctcggaatatccctccaaaaattttttaaggtaataagaatactggtctgtatcaaactcgttgccgcatgcatgtaagacccaaggctctttctgatgagggatgcccactatatatcctttttttctgaactcaaaacattgagaagtatcatataaatgccatccgttaaaaatatcttttcgccatggaacatcgtactgagtcgccagtaataaaccgtctaatgcttgaactgctttcacagtttcatcaatttcatcaaataataaatagttgtacgtgctgcggtattcaatgacttttccggcttttttagaagcctcccaccaaatcccgctttgcggcacttcttcagctcctataacgcctatcatgccaagctgatcattctgctgaaagacatggagaatatcataaataaaggaacgattgatgataaatgtgtcctgatgtaaatacactttatattttgagtcagagtcctccattgccgcctggtagccggacgccatactgtctgcgtctcggatattgattaattctaccttcatatgcggcggtacagaaagagactgaagatgtcttagacagagatcataaagggtatcgtcattcacacatgtaataaagctaattgaattttcgtttgtatgctgattcatcttttctctgcctttatgacatattgataggctctggcctcctcctcaagatctgcatggtgaattcccatgcatgatctgacataagcaagtttgctgatcattttttcataataatgagtcgtaaaaacaataggctcgatttggatgatcttgtagcctgtttcatgaaacatctttttcatttcctccaaggtgaaaaaacggaagtgtgttttatcgagcagccctgcctgtatatacgtccatttgccggacagcagactttcgaaaatcgagatatgtccgatattcgggatgcttgccaagatactccctgtttcttttacataaggcttgatgttacctaaaactgcccacgggtctattaagtgctccagaacatcaccgaagataatgtgatcaaatgtgtttttttgaaaaggcagcttcagtgtttcaatgtctcccgttattacttcgtcaatataatgtgttgctttttcggcagctggtggataagactcgatcccataataggagcaattcgttttttccttcacagctgcgccaaacaagccttcagcacatccgacttcaagaatggttttcgcatgcggttctatcagatcaaatagctgccagttgatgcctttgtaatactctttatcttttagctcatactctttcatagaatcagcaagtgaatttttattgatttccatgatgttcacccccggagccggtctgcatctttagaatatcttcaaaatattttttgttggctagcattcttgaatcatggggacggtattgcaatgccgattcattatgctgataggcaagctgatgctggccgagtttatcgtagcagacggctaattgcaggtggggaagccaggtcgcgcaggcgcggttttgaaaagccaggttttctgctcctttgttttctattgctttttcataccaatagaccgcactctgaaaatcgtttttttctaaaaaagagtatcccagcctgcagcaggtttctgctctaggcggtccatagacgagcgtgtggagcacccagcttaattctttttccttcagccccagtgaatggtagcagtctgctaatttattgcacgctctgatattatcctctacccatccctgcttcgtttgtaaaaaacgtaaatagtactcaatcgcttgctccatttttccgtgatcacacaactcgttcgcatagtaaaataaatctcttggagaaaaatcctttcctgacgaggccattttttcataaattcggaggttgcgatctgcgtcatgactaagtggcaggtgagaaaccgctgcatcactgtggtgaagtttcccatatacttctaggtattcatgaaccgcgccgatccatttaaagctcttttcccgttttacgagccggtatctccttaagctggatgtgacgttattttcttcatcaaaagccaaatggtatttcattgagaccgcgtctatatccggatcaagcgttctttttaaatccaataacagctcttgatctttcttggtaaacacgtcgtcggcgtcaagccataagatatagtcggatgtcgcctgctgaaacgaaaaatttcgggctgccgcaaaatcgtcaatccatttaaaatcaaagattcggtctgtatagcgagcagcaatgtctttcgtcttgtcaactgacccggtatccacaatattgatctcatcagctatctcctgcacagaatctaagcatcggccaataacagcctcttcattttttacaatcatgcataaactgattgaaatcacatcgccacctccgttttattctgttttttctttatggcatggacaaacatgtaatcaatatgggcatgttttgacaagtgatccaaagacaaaccaaattgcccggcaaggaattgaagttcttgtaaaaagagctgtatgtttgattcagtatcggaggaatgggaggtgatggattttatgtcataaaggtattcaggaaatagggtatttacgttgcgaggtgtgatgaaatgtgtgtacgtcgatgcaccacataataaagagaaaaatgtatctgcataggcagtatttgggatgctgcaaatcagcgagccagaaggctttagataaacggcaagagtctcaattgtatgtctgggattttttgagcagtttaaaaggtcaccgatcaaaattacatcgaaaaaggactcagggtaagggaggtcgcatgtttccacatctgccgaaatgacttgttcgtaataggggcttgcaatggtctgtaataactcatccttttcaatcccatacaataaacaggattgccggttcaaaagttctgtccccgcagctcccgtgccgcaaccgatatgtaagatagagtcggcttccgctggcacaagtgctgtcagctggggctgggagtcaaagaatgttgttacatccaccttccatttatcgatgaagcgttgccggttttcttcgtataattgattgatgcttaaatctggattgcctgtaaacgtggcatgaccgtgatggtggacaaacgaatcaagagcgataattagctgataccccgcttgcagtacgcggaggcttaaatcatcatcctcaaatgaaccgcctacaaaacgttcatcaaaaccgccgacttcatccaacaccttctttttgacaagcaggcaaaatccgaccagcctcaatacagcttttgatctgcctcgctgctgcaaacagtaaagacgagaaaaatcttcaatttcttcaacgtttgtatagttaacgggaacttgctgcggaccgctgacataattgcttacaggcccgaccatgccgattttatcatcctgataaagcagcttgatcattggctccagccattgatttgttacaacagtatcattgtttaaaaaaagaatattgtcccctgaggcaacttcaagaccctgattacaggcttttgcgaagccttcgttcgtcttattaaaaatcgccttaattgaagttatctgtttgaggtagtcacgtgtaccgtcatgagagccgttatctataacaattacttctatacagtcattattcgtatgcttccatatgctctccaagcattgttttgttaaagctaattgattataagtcagaacaataatactcgttttcactataacctccgcccttcgccatatcattcggatactatatgtatatcgtaatgttcagacggaatgattctttcctgtaaaaaggagaatgctgcttaaacgtaaaaatgtgaatggttttttaaagaaaaagtcgatgaatttgttttacatttagttttcccttaaggggatcaacaaggttggggaattcagggaaatagggatgataagttgccttaaccagtttgtatgaaagttatatttaattctttctgtactaaatggtgaattaggagttatatatttaaaggagaataccgatgagggcattattttatttaatacgtttatagcaggggagaaggacgaaatatcggtcagataaatttttatataggtttcgtgactttaaagggatcaattatgatttatagaatgttttttgtaactcaaactagttgagtactactttagaaagaatcatcgtgtacatataaacaatgataatttaatgaaatggacatcaatggtgtttccagaacatttaacgtagtttaaataagatttgattgacgtatcagaaattgaaaaaccgtccttagattagcaacatattgaagagatggatcttctagtctatgaggcacttgaatttaacaaagaattgctatcgagactatttgagatgtgtcgtaaatccactaataaaatctgtttttgaagaaatgtttaattcttaaaatggttaatcaatttaagtgcttcatttaagtctcttataagccgataaagtttactggaggacacaaatcataaaaatccccccaaaaaaatttttaagggggaataatacatatttaagaagtgtgacctctacttgcaacttcaaatgagtctttctcaataaaatatccaatatttttactccgactttagaagaagagatcatttgctccaacacaagccctcctatattaaatatgtaatattttatcatatttaaatgaataaggaagattaatgttatcttaaaaaacaaaaaagcctcctgcaaattatgagaagggtaagggaatatttttgagaatcatattccattgcttgttcacagtcagtaatccttgagttgttctagcaagaggcaatattgttgaataagaatagttttaaagaggttattgttgtcttcatattgaaataaagactaagtatattagaggggagttactttaatgcatatcacaacaaaaaggttattgatacgtgaatttgcattcacagattggcaggctgtatatgagtatacatctgatagtaatgtaatgaagtatatacctgaaggggtttttactgaagaagatgcaaaggcatttgtaaataaaaacaaaggtgataacgctgaaaaattccctgtcatactaagagatgaagactgtcttataggccatattgttttttataagtattttggtgaacatacatatgaaattgggtgggtgtttaatcccaattatcaaaataaagggtatgcttctgaggcagcccaagctatcttggaatatggatttaaagaaatgaacttacataggattatagctacgtgtcaacctgagaatattccctcataccgagttatggagaagattggaatgagaagagaaggcttttttaaaaaatgtattccaaaaggcaatgaatggtgggatgaatattattacgctattttagaggaagagtggaattgtaagagaggtaatgcaggaaattgaaaccataacagctatagaacgtatagtgatagtagggcttatagtgcttaatatgaatgatgtgagaggggtatccaaatgcaaattcatctcaccaaaagcggaaaacaagacaatcatcataaatggttaggaactgtcttgctcagttggggaacattcgtatttgctttgttttttgctactttagtcggttcaatggctagccaagcaggagcttccaagcttttgaagcaaggcatccaagcaggtttagtcacattaataactgtcccgttgctctacattcttcttaaacggatgtctagtagacccttttattctataggactgtctgggtggcggcaagccattccgaaagccataataggagcaatatatgtgattgtactatccgggtctggtttcgctatcgcccatttattaggctggatcaaagttacacaatttcacttctctgtccatttagtgacagcattgctcttaaatatgattatcgctttcttttatgaagcttttccagaggaattaacttttcgggggacggtgtactatgctctaaataagcgttggaactgttttatggccttactcctacagccgatcctgtttgtgcttgcaccaataactgtaagtggcttgcaatatatagttggaattgaatcatctgctatcacattagattacattgttttattgttgggttttggattcatccttcaactcctgcgtattgtaacaggaagcttatggacgtctatcgcttttcatctagcctttcttgaaaattctcggttcttcgtcctgcaggggaaggagcgctttattacctatgaagaaattgttccgggaacaggtgcgctgtttgtgatcttttttatgttgcttattgccggtactctactcttaatacctgttgcgataactcgccgaaatactattcaatggcggaagaatgagaaatgcgaccaagatgtttaatttctaagtagaacagtagttttaaagtgattttaaggaggatctagacaatgttgaagaagcattcatgatgaaagattagtagattttgattctcaaggtggaaaccatattagtgtttatttagttactcactttgagttatctgatcaatcgtattcttttgggtatgaagcataactgttcgtatgcaatggatattctaagcgttaaagaggaatttgatttcgatttcccatttaatatgcttgcaataaaaagctatgtacaagaattaataaaatgttagggattgatataactctgcctgaaatgaaagaaagagattttgacaaactttctcaagattaaataaaactacgattttaaagagaacggagacttgctttcaatatgaatgttaaaaaaactgcagctgttttttcaatcacgattccaattatctcagctatcctaattattaatttttttacgggagttatgtcaattccatggcaaggaatgccggtgttttttccattattgctttctcctataggaatcattttagcgttcgtttcaataaagacaaataaacggtgtgctttatatgggattgtcttaaatgcaattatgtttccatttccttttttctggtttatcggaggggctttgttttttggagtttaaaatccattaggcattacgcttatacattggtattttcgaacttgtcaaaagaaggaataaaaaaatttcagaattgcttggctttactttatgttgaaaggggtcgagtaaggtggataggaaaaaggatgaaatacaaagaaaatatagggaacaaatgagggagaagaaagaacgagaaaaagaagatggcagttcacatacttttgaaattgttgttgtgctagccattatcattttgatgtttttctttaattcagttttcaaggctttttagatattgtacagatgactttcaggatgtttgaaaaaataaccctttgatatatataccacatgaaagtattgaaggacttatgaaaattcaagagccagttgaatcttaataattaatcaccaaataatggggatgtaaaatgaaattgtataatgaatttatcaatatagctaaaatttttaataaagagctagacatcattccattattatatggatctttaggtcttgaaaaggtaactgggttagacttttctccagaagatattgatctccttattcctttaatttttttagaggaaaagtgggaaaaactaaaaaaagtgatggaactgcatggatacaaaatggttgatttacatgagcatgaatttaagaaaactaatacaaaaataggcattgcttacattgaggatttaaaagcatttgcagatgtagactataataatctagaggtttttgaagatggcggagcgaaatatcatttgctaacgattgatgattacctcaaggtttataaaaagtctttattagatggttatagaagaaggaagaagaatcataaagaccaaagtaaaattaacatattgaataaattaatacggaattaatttctgtattctcttttgtttccagtctcaattaaaatttttaagattaaaataagtttgaaaggataaatcatagtgtttaacacagccattaatcctcagacagtcaaaaagccatttctactccggttgaaagcttttcaatttttgcttcttatttatctttcctgtattgatatatgtatgtagggttggacttataacataaactattctggccattcctgttctttcaattcatgaccgggcttgccatcagcataaatctaggctaacagtctccatacatcctgtgatcacctttatcaaactcttaaatgcaacttaccactaaccaattctttatttcgcatagatcatctttgtcatgtgtttacacaagaatctgttttggactaatcgtcgttaactgatacatgacattcgcaaatatttgagacactgaatataacgaaacagtcaaaaatcaatatttaattcattctgtttaaactttctgaaaaagatgttgaaaaagttgaaaggattttataatattaaaacaagttagtttgttcgatcaacaaactaataagatgaactttcattgtccacaagataaggtcttactaaatatggatggaagggggataagagggtcgatttaatggagctaaacaatataagaaacgaaagaatgaggcttttatccttttccaggtatataaggtatgacgagaaaagatgaattttttgcttgctgatcaccatattttttcgcactgttttgaaagcgcttttataaaagtttactgaccgtaaattcgagaaattgttataccgtttcacactgttccatattaaaggatcgaaaaggggagaaatcatgctcagtgaaaatgtaaagaagattagcatggttgaaaaagttggatatgcgtctggagattttgcttgtaatttaatttatgcaacagtgtctacgtatcttttgttcttctatacagatgtttttggtttatcggcagcagcagccggtactatgtttttagtggttagaataatcgacgctctcgctgatccttttatcggaacaatagttgacagaacgaacagcagatttggacgctttagaccgtatcttttattcggagcttttccatttgtcatactggcaatactctgttttacaacaccagacttttcggatatggggaaattaatatatgcctatataacctatgttggcttgtcgcttacatacacaacgataaacgttccatatggcgcgttaacttctgcaatgactagaaataatcaagaagtggttagtataacttctgttcgcatgttatttgcgaatcttgggggacttgtcgttgcattttttgttcccttactggctgcttatttaagcgatacttccggcaacgagtctcttggctggcaactaaccatgggtattttgggaatgataggcgggtgccttttaatcttttgttttaaaagcacaaaagagcgggtcactcttcaaaaatccgaagagaaaattaaatttacggatatatttgagcagtttcgtgttaatcgtccacttgttgtattaagtattttctttattattatttttggagtgaattccatcagtaattcggttggcatttattacgtaacgtataacttagaaagagaggatttggtgaagtggtacggtttgataggaagtttgcccgctttggtcattttaccgtttattccaaggcttcatcaatttttggggaaaaagaaattactaaactatgcattattactgaatattatcggcctcttagctttactgtttgttccgccaagtaatgtttacctcatacttttctgtcgattaatcgctgctgctggaagtctcactgccgggggatatatgtgggcgcttattcctgaaacaatagaatatggagagtacaggactgggaaaagaatgggtgggctcatttacgctataatcggatttttctttaagtttggtatggccttaggaggagttgttccgggtctggttcttgataagtttggatatgtggcaaatcaggcacaaaccccaacggcattaatggggattctaattacaacaaccattattcccgtgttcttgctggttctagctttaattgatattaatttctataacttagatgagaaaaaatataaaaacatggttcgagaattagagaatagagacaaagtttatttggatcatattgatgatttcaaagcttaaaaaagaaaataaactgaggaggagtcccaaatgaagattaccaatccagtacttaaaggattcaatcccgatccaagtatttgtagggcaggaggggattattatatcgctgtatctacatttgagtggtttccgggagtccagatacaccactcaaaagatttagtaaattggcacttagttgcacatccattacagagagtttcacaattagacatgaaaggaaatccaaattcaggtggggtttgggcaccatgtttaagctatagtgatgggaagttttggctgatctatacggatgttaaggtagtagatggcgcatggaaagattgtcacaattatttagttacttgtgaaacgattaatggtgattggagtgagccgattacattaaatagctcgggatttgatgcttctttgttccatgataaggatggaacaaagtatttattaaatatgttatgggatcaccgtattgatcggcactcatttggaggaattgttatacaggaatattctgataaagagcaaaaattaatcggtaaaccaaaagttatatttgaaggaacggatagaaaactgacagaagctccgcacctttatcatatcgggaactattattatttattaactgcagaaggaggaacacggtacgaacatgctgctacaattgcccgttctgcaaatattgaggggccatatgaagttcatcccgataatccaatcttaacgtcatggcatgacccaggaaatccattgcaaaaatgtggtcatgcatccattgttcaaacacatacagatgagtggtatttagctcatttaacgggacgtcctattcatcctgacgatgattcaatttttcagcagagaggatactgtcctttgggcagagaaacagctattcaaaaactttactggaaagatgaatggccctatgtagtaggtggaaaagaaggaagcttggaggtagatgcaccttctatacccgaaacaatatttgaagcaacgtacccggaagttgatgaatttgaggattcaacattaaatataaattttcaaactttaaggattccattcacgaatgaattaggttcattgactcaagcgccaaatcatttacgattattcggtcatgaatcattgacctcgacatttactcaggcatttgtagccagacgctggcaaagtctccattttgaagccgaaactgctgttaagttttatccggaaaattttcaacaagccgctggattggtgaattactacaatacagagaactggacggctcttcaagtcacgcatgatgaagaacttggccgcattcttgaattaacaatatgtgacaacttttctttttcacagccattaaataataaaattgttattcctcgtgaagtaaagtatgtatatttaagagtaaatattgaaaaagacaaatattattatttctattcttttaacaaagaagattggcacaaaattgacatagcactggaatcgaaaaaattatcagatgattacatccgtgggggaggattcttcacaggggcctttgtagggatgcaatgccaagataccagtggtaatcatattccggccgactttagatattttcgttataaagaaaaataatttgcacatgaaaaaggagatttctattttagaactcctttttcatatgagaaggtgcctatgtcactattgcttcagaaatacccctagaataaaaaaactcatctttaaagatgagctgtacattccataaaaattacattgtaaccatgtccagaaaatgatcaatcacaatggaggacattcctaatgccggcgcattctgtcctaaggaagatggcaataattcatagctattgcctaattgggaataaacccttgacgatacttcacttctcattgaatttaaaaccataggatgtgattcaattatgctatttcttaaaattacggcctgtgggttgaaagtattcaaaatattggtaaggcctattcctaaatagaatccaaaattctgtaatgcgtttaaggttccgatatcattcagatgggcgaggtttatgatgtcttgataggacagttttttctctttggtctgaagagattttaataaagccttctctgaagcatacaattcccagcagcctcggtttccgcaactgcatttaggaccattaaagtctattgtcatatgtcccatttctccagaaaagccgcttactcctctatataaatgattgttgataataacaccgatccctatccctgtgctgatacttacgtaaataatgttatcgtgattttttgcagctccaaatactttctctccatatgcgccagcatttgcctcattttcaataaaaacaggcacattgtacttctcttgtatcgaagattttaagtcaatatctctccagttggagttcggagtgaaaacaattttttgatctttatcaatgagtccaggcacgcaaatacctataccaataagcccgtacggagattggggcatatgcgtcataaagtgatgaatcatatcaatcaaaatgtctttcgttatttctggagaattggattccaaatgacggtattgatcaagaacgatcgttccttcaaggtctgttaaaatgccattgatataatccacaccaacatctattcctacggagtatcctgcctttttattaaaaacaagcatgacaggtcttcttccgccacttgattgtccttgacctatttcaaataccagattttctttcattaacgtgtttacctgtgatgaaacagttgatttatttaatccagtcatttcagataattttgctcttgaaataggtgaatttttaaggatttcttttaataataacttttgatttacttttttgacaaaggtttgatcagcgatatccacttcatccactccatttgtttaatctttaaattaagtataaacatagtacatagcgaatcttccctttattatatctaatgtgttcataaaaaactaaaaaaaatattgaaaatactgatgaggttatataagatgaaagtaagttagtttgtttaaacaacaaactaataggtaacttacaatatgaaataaaatgcatttgtatttgaatgatcaggttttgaatttatttttaagggggaaatcacatggctcaatctcattccagttcaaccaactattttggaagcgcaaacaaagtggtttacgaagggaaagattcgactaatcctttagcatttaaatattataatcctcaagaagtaatcggcggaaaaacgatgaaagagcatttgcgattttctattgcctattggcatacatttactgctgatggtacagacgtttttggagcagctacgatgcaaagaccatgggatcactataaaggcatggatctagcgaagatgagagtagaagcagcatttgagatgtttgaaaaactagatgcaccattctttgcttttcatgaccgggatattgcaccagaaggcagtacgctaaaagagacaaaccaaaatttagatatgatcgtgggcatgattaaagattacatgagaaatagcggcgttaagctattatggaataccgcaaacatgtttacgaatccccgtttcgtccatggtgccgcgacttcttgcaatgcagatgtgtttgcgtatgctgcagcacaagtgaaaaaagggttagaaacagcaaaagagcttggcgctgagaactatgtattttggggcggccgtgaaggatatgaaacattgttaaataccgatttaaaatttgagcttgataatttggctagatttatgcatatggcagtggattatgcgaaggaaatcgggtacacagggcagtttttgattgagccaaaaccaaaagagccgaccacccatcaatacgatacagatgcagcaacaaccattgcctttttgaagcaatatggcttagacaatcattttaaattaaatcttgaagccaatcatgccacattagccgggcatacattcgaacatgaattgcgcatgacaagagtacatggtctgcttggctctgttgacgcaaaccagggtcatcctcttttaggctgggatacggatgaatttccgacggatttatattctacgacattagcaatgtacgaaatcctgcaaaatggcggcttaggaagcggcggattaaactttgacgcgaaggtcagaagatcttcttttgagcctgatgatctaatatatgcccatattgcagggatggatgcatttgcaagaggattgaaagttgcccacaaattaatcgaagatcgtgtgtttgaagatgtgattcaacatcgttaccgcagctttactgaagggattggtcttgaaattatagaaggaagagctaatttccacacacttgagcaatatgcgctaaatcataaatcaattaaaaacgaatctggaagacaggagaaattaaaagcgatattgaaccaatacattttagaagtataacaggataagctccagatcctgctatcaataccaagtcactgaattacccgtcatgattcctttcctattgcttgttgttatgacgggtaacttctataattaggatttatttagagtgaatggtttttaaaagggcaaggagtgaaaaaatgaagtatgtcattggaatagatcttggaacgagtgctgttaaaaccattttagttaatcaaaacggcaaggtttgtgcagaaacgtccaaaaggtacccgctcatccaagagagggcgggatatagtgagcaaaatcctgaagactgggtacagcaaacaattgaagcattggctgaattggtttctatatccaatgttcaagccaaggatattgacgggataagctattcgggacaaatgcatggattagtactgcttgaccaagatcttcaggtgttacgtaatgcaattctttggaatgataccagaacaacgcctcaatgtataaggatgaccgagaaatttggcgatcatcttcttgacatcacaaaaaaccgtgttttagaagggtttacattacctaaaatgttatgggtaaaggaacatgaacctgaactttttaaaaaaactgctgtgtttttgcttccgaaagactacgtgcgattccgtatgaccggtgccattcacaccgaatactccgatgcagcaggaactttacttttacatattactcgcaagaagtggagcaatgatatttgcaatcaaattggtatttctgcagatatttgtcctccgcttgttgaatctcatgattgtgtagggtcgctgcttccgcacgttgccgccaagaccgggctattagaaaaaacaaaagtgtacgctgggggagcagataatgcttgcggcgctattggagcaggtatcctttcttccggaaaaacattatgcagtattgggacgtcaggggtcatactttcctacgaagaagaaaaagaaagagactttaaagggaaagtccacttttttaatcatggaaaaaaggattctttttatacgatgggcgtcacgctcgctgcaggatacagcttggactggtttaaaagaacgtttgcaccaaacgaatcgtttgagcaattattgcagggggtggaagctattccgataggagccaatggactgctatacactccttatttggttggtgaaagaacgccgcatgctgattcttctattcggggaagcttgatcggaatggatggagcccataatagaaagcattttttgagggcaataatggaaggtatcacattctctttacatgaatcaattgagctattccgcaaagcgggaaaatcagttcatactgttgtttctattggtgggggagctaaaaatgatacgtggctgcaaatgcaagctgatattttcaatacgagggtaattaagttagaaaatgaacaagggccagctatgggggctgcaatgctggctgcctttggaagcggatggtttgaatcccttgaagaatgtgcagagcagttcattcgtgaggctgctgcattttatccaaaggcacaaaatgttcaaaaatataaaacactatttgatttgtataagaacatttatactcacacaaaggatctcaatcaagctttgaagagctttcgaaaaaactaatgatgttattgtctggagatcaacgaaagaacaattaacgattaatcatcaaaggcctttgatgacatggctgccttcttttgaaaagatggtgagaataaggtatcgcaacctttaaacagtattggagtgtccagcagacaaaacgaacgagcggaaccgtattctgtcagcgaacacttcaagaagtgagaaagcttaggaatgccaatgggtaagatgtatgaaaccgcgctaacgacggtagagggatctcttgatttatgatgaaataggaaggatgtttacacacaaataaccccctcacattgacgtgaaggggtgttttttattgttactatacagcggaaattttacaggctagttgcatgattttagcttgataagcagaatggaactagactctccatcatctctttctaattctttggaaactgcattctgctaggtttgctgctttttttaacaaacagtgtttttctatttcacacagccattaaatcctctgttcgtcacataaccgctcttactccaaattgacagtttatctgattttgcttcttgctcatctagtctgaattggtctatgtattttgtgttaggctcatatacatatgctactctggccaatccctctttcaataatgtctcttgaacagatttgccgtcaacataaacgtatgctaacagtcttccatacttatctctgcgatcgcctttatcaaattccagctgtagcttaccgctgttgaccaattctttatttcgtttcgacgcatcctcaccgtatggttgaacacaagaatttggtttcttcgtctcaggtgtatcaacgagcaagtagcgcactgtgtcttcctttccgttgtaaataaccttaatcgtatctccatctattgctctatctaatgtaacatcgaccaatttcttctgattttttgaatgaggcgtgccggccttttgttctgtctgattatatttattagattgagtatcttgagagacttgctccgtcccattagaatctgaatggtttttggctgcgtgatttgatccgcaagctgccaaagtaatacttaaaacgattgcgatcatactgatcaaaatcttcttcatattgattccctctttatcattttctctttttgcgtttaaacatcatcattataacgatatggacattttttgtgaatggaaaacttcaagggaacttataacactccaaattgccaatagttaactttacaacgagatgatcaaaacatcaccatcacatagcggaaataaataatcctgaaaataatattgactgaaaatgcttttggaattatgataatatgagaaatgacaataatgtaacaaaaacattactacaacataacaactgatagcttaggtttattctattggctaaaaatgtaaacggttacaaatccagaggcgaaaatctaagatagagatgactttagttttgactcaatatccacactgaaagagcttattaagtattcttaataaaggcaggggaaatggatatgaatgaacatcgaaatcgaaggttgaaattaataatgatttcagcaacttttggagggcttctctttggatatgacaccggagttataaatggagctttaccttttatggcaaggccagatcagcttgatttaacaccggttacagaagggcttgttacgagtattcttttattaggtgccgcatttggagcgttgttatgcggaagattggctgatcgatatggccgacgtaaaatgatccttaatctttcctttttatttttcctggcatcactgggaacagcgttagcacctaatgttttcatcatggcggcctttcgttttttactggggctggctgttggaggagcctcggcgatggtgccggcctttttagcagaaatggcaccgcatgaaaagagagggcgtatggtaacccaaaatgaactaatgattgttggcgggcaatttttagcatatgtttttaatgcgatcctcggtgtaacaatggcaaatacgggacatgtttggagatacatgctagtcatttgtgctgttccggctatcatgttatttgccagtatgcttaaggtcccagaaagcccccgatggctaatcaccaaaggcaaaaacagtgaggcgctgcgagttcttaaacaaattcgagaagataaacgtgcagaagctgaatgtagaaaaattcaagaagcggtagaaaaagatacagcactagaaaaggcatcactcaaggacttttctacaccatggctgcgccgtcttttatggattggaattggtgttgccatcgtgaatcaaattacaggtgtgaactcgattatgtattatggcacacaaatccttaaagaatctggttttggtacaaaagcggctttaatcgctaatattggaaatgggctgatatcagttattgcagttatatttgggatttggctggtcggaaaagtgagacggcgtccaatattattgattggtttggcggggacgactacagctctcctattgattgcgattttctcaattgtgcttgatggatctatggcacttccttatgtagtgctttctttgaccgttttatttcttgcctttatgcaagggtgtgtaggacctgtgacttggcttgtcatagcggaaatattccctcaaaggttaagaggacttggttctgggataagtgtttttttcctttggatattaaactttgtgatcggttttgctttcccgatcttgcttagctctgtaggtttgtcttttacattctttatatttgtggctttaggtgtattggcaatcggttttgtgtacaaattcatgccggaaacaaaagggcgtacacttgaagaattagaagagcattttcgttctcgacacgatcataatactcctgaacaatcagttattgagttataaatatgttgaaaatctctcttcttataggagggatttttttagtttcagaaaaaacaaaatccctctggtagagggattttgattcagcattttaagatgttctacacgtataatactggagttgatactttaaaaatctcgccatctcttatataaaaacgagggatgcggcggcttaatgtagacacgacttcatagttaatcgtattgagcatttcagccacttcatcaacggaaatctcggctcctttttgcttaccgtaaatcacgacttcttctccttgtttaccttcaccgttttctcctaaactgaccatgatcatatccattgttactcttcccgccactggcactcgttttccgcgatgaagaacaaatccgcgattggaaagggcacgagaatagccgtcagcatagccaatcgggagtgtagcaattacttcattaggttctgcgatgtatgtagcaccatagctaacggttcggggttctgtccgcatggttttcacataagcgatgcgtgcctttaaacttaacgcaggttcaagcttaacgagatttagttgtttaatataggctgaaggatataaaccatataagccgatacctaaacggatcatatcagcgctaaattccggaaatgcgatagctgcagccgtgttgcacatatgcacggtgggcagctcaatcccctgtttttttaaaaagctgagaaaactgatgaatttttcatgctgcagctttgtgagtgtggtgtccggttcatcagctgtcgaaaaatgtgtgaaaatccctgtccatctgaggaatttacttgcctttaaggctttcactacttctaaaagttcttcctttgtgcgtacacctaatcgtcccatgccggtatccacgttaatatgaatggccagccggttagcactcgcttctttttccaatatctcgtttgcttctttcatccaatcaacctgaaatgctgataatgttatattccaagctgctgacttctttacacaactaagggatgtaaaaccaagcacaaggataggtgctgtaatcccagctttacgtaaaacgattccttcctccacactggcaacagcgagctcactcgccccgtgttccagtgcatggcgtgccacttctatagacccgtggccataaccgttcgcttttacaacagccataattttgctcttatgtggaatatgacggcggatcgctcgcaaattctttttaacggcatcaagattgacttcgatccaaacttctcggcaaagctttatcatcaacgcttccttccttcttatggattgtaaataccacctattgccgcaagaataaatgttaattgttggatgattcgatcttattttattcaactttatttgaaatcattcaacagcaaatccatgtgatacgagaaggtgcctatcaatgttcgaataatagcaagtacgggatacatgaggcttgtaagtggggtgttaatggatgcggcgaccgaggattacaaaaatgattatttgttttgggacatttttttctaagggtagatgataacgagaaatctaatcaggaaatacttaccgttgttatgaacattgaagaaccttttaaatgagaagggctgaggaaattctgtaaaagataatcggttgaaaaggcagtcgattccttgttccataaacctaacatcagagtatataattatactcgtattcacaaaaatcgtttaagtaaggggtatacatgaataggggagttagttttcaaataccgaatgaatatggaaattttctatggagaatactgcagccggtagaaatagctaattataggtggcaaacgagtggggaatcttattttgttgtagaaggagagctcgatgatgaggagctttttcatgactacgcaattgttgagggggcagtttttgagcaacaattaaaaacgaatcagtactataccattttcgttgaactgaaagcatttccatatggaaaaatggttaatcaagtcaatacatatgaagagtttgctgacagtgattgcgaacttgtccttttgatagcagataatagctacgtttcgatttactgtaaaaacaaaaatatcattgaaaaactttacttcaatgctttacagaatgattttgaagacgttcaatttataactgatgaaaatgacacaagaacaagccttactgtatgatactcaataaaaattaaaggagctagtacatgacaatgcaaattaaaatcaagtatctagatgaaacacaaacaagaatcagcaaaattgagcagggagactggattgatcttcgggcagctgaagatgtaacaatcaaaaaagatgaatttaagcttgtcccattaggtgttgcaatggagctgcctgaaggttacgaagcacatgtcgtccctcgttcaagtacatataagaactttggcgttattcaaacaaattcaatgggtgttatcgatgagtcatataagggagacaacgatttctggttctttcctgcttatgcattgcgtgatactgaaattaagaagggtgatcgtatctgccagtttagaatcatgaagaaaatgccggcggttgaattggttgaagtcgagcatttgggaaacgaggatagaggaggactcggttcaacaggtacgaagtaaacaaaataaatccttggctgtcttcatgctgtgtgattgatcaatggaggtttcagccaaggtacaaagaaatacttttatctaaatttttataagtaggggaaggcaactacaaactagtaatgccactaataataagccaagttaaatgacatgtgttcattaataattgaatttacagcagccatgagcacaaaaaaatctgagtatcgtcgataaatatcataaaaaaccccccggtatgtcgccggggaataaatagacgtttaagagatttagtgatgttttttatatgattcgacaaaatcataataatgatcatcgtcatcataatactttttttcgtaatgataatcgtgatcatcgtaatactttttatcatggtcatcatactttttgtcgtaatcataatgttttttatcatgatcataatacttgtcgcaatcataatgcttcttatcattgtcgtaatactttttgtaatatgtttttttccaagtgtaatactcttctttatattttttataataacccaattaaattcctcctttatgttattcgaatttaatttatgaagtttaaatgatatggtatggtcaaatgaaataagaatagtaaaaagaggctgtttaaaacactttctgaaaaacaaaacggatagctgtttattaaaacaagagcgagagaaagcactcaatcactgtaaaataatagtaaagtgtatagagaggattaatatacgtaaaaagggactttctcattgaagaatatttgaacgttatggttaagattcagagctctatgatgtgatttttaacactgcttttgaaggatttaaagttagacatcaaaaacaaacagcaaaaccggttagaaacagatcatataaggaatgaaccgctgccaaatatcataaaaaagttgttaatgatcaaatgaatgaaattagagagaatttattttaaagaaagcccaattgcacatggacaaatgacaattgatattgaggtaaaatacaatgcattaaatcagaaaaagctattggaggatttaatgtgtttagacaatttccaatttggtatacacaaacacctgactatttgaatttttatgtaccgcaatatcaaaccatttcgtataatcctcaacaatgttatcaacggtgtatgtaccaaactggcggtaactatgagctatgtgacagactatgttatggagaaatacaggtgtaaaagaggggggattaactcctctttaaacacacagtgagtggaataagatcctcactttatctgcaagtgcttagtatttgcgataatattgcattcgtaataaattatgcttagcaactgaaaatgaaagaaggatatgaatagtcatgacgcaattcgataaacaatacaattcaattataaaggatattatcaataatggaatctcagacgaagagtttgatgtaagaaccaagtgggactcagatggaacaccggcacatactctaagtgtaatcagtaagcaaatgagattcgacaactcagaggttccgattttaacgacaaaaaagcttgcctggaaaacagccattaaagagttgctctggatttggcagctgaaatctaatgatattaatgatttaaacaagatgagcgtacatatttgggatcaatggaaacaagaagacggcaccatcggacatgcatatggatttcagttggggaagaaaaacagaagtctaaatggagaaaaagtggatcaggtagactatcttcttcatcaattgaagaacaatccatcttcacgcagacacattacaatgctgtggaatcctgatgaattagacgcaatggccttaacgccatgtgtatacgagacacaatggtacgttaaacatgggaaactccaccttgaggtaagagcacggagcaatgatatggcattgggaaatccattcaatgtattccagtataatgtgttgcagcgcatgattgctcaagtgactggttatgagcttggtgaatatatctttaacattggggattgccatgtgtacacacgtcatatagacaatttgaaaatccaaatggaaagagaacagtttgaagcacctgaactatggatcaatcctgaagtgaaagatttttatgactttaccatcgatgatttcaagttaatcaactataaacatggggacaagcttttatttgaggtagcggtttaatgctgcctttttattgttatttttcagaatataagctggcattaggctaaaaatgaagaaatttcttcttcatatttctataaacaaatagtaaacaaaattggagcccaacgcgaaacaaaaggattgttagaagcgttgggttctcttagtacaagtgaacaacgattgcgtggtctgaaaaattaaacgaacgatatgaaaaggccattggttttataaggtgttaattcctcctattaatatcataaggctcaagaaaattgtaatgaaaagaaaagcccatactatagctgtaaaaggattgttgagtcccatcctttctttccaatttatattagtggatcgattggttttgtattttattaactggatacataagatcacattaaaaaaaactgaaataacaagagctataactaaataaaggttcattttcatcaacctttctaggttttttaaacacttgaatagcttaattgtaaacctaatattaacatatacatatttcaccttaaaagaccagcatcgtgcaatgaatacaattactttgtgcagttctaggttatttgtttttattatgaaactttttggtccctggctaaaattcaacttaaaaatgaaaagattgaaattatccatgattgtgtttctgcgatggattgccttaaaatttggtagggatgaacaagcactatattaaataatactataccaatgaatttctattagaaaaattcataatattttaaaataaccatttaaatatatttctagaaattgtatacttatatggtactaaatgaatacatagaaaggactgttgtcgatgaaaaaagttttttgtaagttagccattagttctatagctctatttaccctatctcttcctaatggcaatgtattagctgctgaaaaaggggaagaaaaacctgtctcaattaaaggcgttgagtcacaagtgcatactgtatttgcaaacgagacaactggggtaaaaagcaacttaggaggaggagagtttactgcgcaatttgtgaatgattttcgtaatgttaagatgaatgtaaaaacatataaaagctggtctagctttaaaagagtttctgataatatagcaacggggagtaaaggaggatctattactgcaaacaaaacagttacttttacaacaactgtcagcggatctataagtggtttaggaatatccactgcaggctctgtagctagctctaaaggatacactctaaatgttggagcgaataaaagagtctatatggcatatagagttaggtataatgtagaagaagggtacaattgtcgtaaggatatagttactggtaaatgtgtatcaaagaaaaaatacgtagttaaaaaacctatgtatggagaatatgcactgaaaaactattaattttatataaaaaagattagctataaaagctaatcttttttattaagaagaaaatatcctaattttgaaacgagatacaaagtgaaagcaatcattaatgttctcgatataacaattccatgaatagccaaatcatatccagcaggtatcaaagcttttgtattaaacataaaatacattgataccagaagagcaataataactaaaataattccaaaaagacctatttttccgtatttcatacaaattccaccctatattaaaatatgataaataaccaaaggagctgaagatttcgataattcactttacaatcatcaagcaatgaccaacatcgaacctttgttggtgtaattgtcaacttaagcttcaagttagttatttttgtaattaaaaaataattgaaagccccataaataaggggcttttaatttatgtagttctatagtaattgaattaatcataccaaagttatttcaaaatttcaacttttgcttatgatgtttttatcatcgaaacaaaaatgtcttaattctaacgctgttcaaataaagtttcatataaaaaggaagtactactgttcgtaaatctatatagggagtggattccgacacggttttttatggagatggaaaattaattataaaaccgccagacaatgctggcggctttttgctgcttcgtttatttattaacagagatcgtaacgttatttcctgcaactgaaacctttgcgaaatcctgtgtatctaccacaggagtgacggctttattgtcgattgtgatgttgttaaaagatgtcgaaaaggttgctttgatcgcatcacgctggctttcatacgaaacagccgcggtagcaagggttttccattttgaaatcgtgccgatgttggttccttgaatttctgtgataatccgtccggtgtagccgtcattgttcgttccccaaagggtcatgcgcgtattgccgcttaaatttttatagattgtcatttggactgtgcttccagggcggaagcctttattgtatgtgaatttgtcttttccttcgatgtacgtttcttcatttttggacccaaccttcatgaggggcttccagacgttgtattgtttgctgtactgaagcccgatatcggcttcagttccgcttgttgccctaaagccagaataaatatagggagtagagaccgagtcgttgtttttgacagtttcaggaagcgtgattttagctgtaaaaatggcgcccgtactgttcaggtagacacggccgccgattccgttaggcagctgggatgctgcttttgcgacttgagcgtctgccgcgggtaaacctggtatacctgatgaaagggttccgaaaagaactgcagttcctactgcacctgcaatcaatacttttttcatcaaaattccccctttagatagtggtttcgccatttattatacctaattttggaactggattgatgtatataaatcgacaaaatatttcattttgagtgaagtaagggacgaaacgcttcgccaatctgaaagctatatacctttatcagaggaaagaatgagatcacaatcgttttaaccgatttgaaattttcctcaaaataaaagtacaaatgcttaaagaaacgattattaaaagaatgcccgctatcgtttcccagcctgtaaaaaagaggtgacgtttcatcaatgtctgtccttgtaaaatgataaaagcacagataccgactaagaaaagaaaacaaatacttaggattgctaacgctttacgtgagtatgttttcatttcatctttaaaatacagcaatacgaaaacaaagcagataacattggctattgtgcttatcacctcaaagcttttcatgacaactgatataaatagacaaagtaaaatgagataaaatacgatgtttctatacaaaaaacctctccttttatgtatgatcctcaaagagtttataaaagtttctttgtaactgcaataaactgaatgcgctcaattatgaactaactaaactatgtactaaatattcactattcattttcagattcagtcaccaaggttttcatagaaagggaagcttcagaaatatacatatagtgcacaaacaaaaaagacccggcaatagccgggggaaagtaaaaacgaggagatgttaatggcgtttagtagtgttttttatgctttttatactctacaacataatcatagtcttttttatcgtgatcataatattttttatcatagtcatcatattttttgtcgtaatcacagtcataatcttttttatcatgatggtcataatcttttttatcatattcgtaatacttcttataatacgtttttttgaccgtataatactcttctttgtattttttgtaataacccatatatactcctcctttatttttactacgctttattatacggcgagtagattttgcggcttggacagttaaaatcatagaaggaaaaaagggctgtccaaatgatagaaaaagacagatgacacaaaaacaaatcaaaataaagagccgatttttcatcggcccaaacgatttatcctacatttgtttgtcttcttttttttctgagtcattttttctgatatcctgagtcagtccgcttgttgcttgtttaaattctgataaggcttttcctgctgcacggccaagcgccggcagtttatcaggcccaaatactaaaaaacccacaaacaaaataacgagtatttttgtgaagcttaattccatatccttttccccctgattgaagtacaaccttttaaacaaattataagagatagcagtacaaatgggaatgcatttattttgaacattttaaaaccagacaaagacggattcataaaacggctgctgctgaatataatgtccaatgccacctgcctaagaagcagggaggaaggctggatcaattatgtagctctgccggaaatgatacaaacgtatctgcggctatcattgaaatagaggagtggtgtagctgatgagattcactaaggtagttggatttttgtctgttttagggttggctgcggtttttccattaacggcacaagcagaaaaagccggaactgcgggggctggagaatgggataagttggggacttacacatatacttactcaagtccgacggtatactcgaccggaggagattttagagtgtgcctttcaggaagcactcctttttctgtttcactgcacttatatgaggatgatcccggtgacaatcctgatgattatgtaggggcaaactatttttcacccggagaatgccacacctttggcagtattggaaaatttgtagatgggagcaataacaaggccgagttctttgttaccgattactctggtaaatctaaaactgttacgttttatgattgatggactcaaattgtgaagtataactcttgggaaaaataaaaaagagagagatacctctctcttttttattcttcgacagctttacgaagccgttcatttacaatgccagtccagccgccatccatcttaccgcgaacgacggagcttttctcgtttgctttgccgatcacttcattcggctctttccagccgctgtgaataagggtaaaccctgtcttttcccccaagtcttctaattgaaaggtaacgacccatccttctgtatcccattcaaaagaaagttcagttggagcttgaacagccaaaactttacaaggggacggcccaaacggcgattgtaagtgaaattcttgtccttctttgagctgaaagtcattgggcataaaccacttggcaatgccttctgaagtagagactgtctcccagactttctgaatgggagcctccagggtaatgctttttgtaatatccggtaatgcattttcgttgttttgagccatttcgtttacctcttgacatatgatgtttttttcaattcaatcatataataactaatatgatcatgtccatagcgtgcattatttatgctagagctgctgttcaacagcgtgtcagttgccagtctgatctgtgaatgggagaattctgcatgttcgagaaagagagagatgtgtatgttgtcatttcgttcatgcttgtttgctcagccgcaacagttatgtttgaactggaattcctgttcagccaatttattttgcgatttttgttttaatagtaaatgagccattttctaaaacaggaggttttttatgcttggaaaaatcaaagcagccattgataacagtccagggaagccggccagaattatagttagtgaaaaagcgtttcagcaattagaggaagaaatgcgctttgtttacgtttccaaaccgaaaacgataatggggattcctgtggaagtttcagaacaggcagaaagcttcaagctggaattttagtttatcccagactgctaaaaggctcattttatgataattatgcaaaatggtcaggttggtttctttaaaagcatgatgaaatgttcatcatgctttttttatcgagaaaaaagacgaacataaaaaataggtatacgggaaaaataatcctattagagagaggggaactgacagatggataacatgatatcaacacttactgactggaatgtgtggtttcaagtgttaattgtatttctcgttccatatgtaatctataaagtgtttacttggattcatgtataagaaggtgcaatgatgaggtggcggagcaatcagtacaaaacacagaagcagcatatatcaggtcattcaacagctgaaaaggatcaggatgtgttaaccggtaacatcggatacgatttagaacatgtaaaaagaaaaataggacataacggggacgttcacttccgtgagcttgaaatcactcatttacatgtaaaagcggtattgatctttgttgaaggaatgtctgatcaggaattgattaataaaggtctatcagtgttagttatgaatcaacctaatcaggtaagcgatgaaattcaatccggcaaaggtactttaacttcgaaacagataaaaaatcaaatcatatcaatcggtgatgtcatagaatcagagaaaatcagtgatatcgtgttgaatgtgttcatgggttcgacagcgcttctcatcgatggaataccgcaggcctttcttctgggaactgtaaaaaaacaaaatcgaagtatcgaggagccgctttcagaagcgcttgtcagaggaccgcgcacaggctttacagaagagttgagtacgaatacagctcttttgagacagcaaggaaaaaatgatcaattaacattgcagagatttgaagtaggaacacgattaaaaaaggatttaatcatcgcttatatgaatgacattgcagatccaaaagtagtcgaggaagtaagaaaaagagtgagagggattgagatcgatcatttgccggagtcaggttacgttgaacagttaattgaggataattatttgagcccgttcccgcaagtacagagtacagaacgtcctgatcgcgtcataagcggattaatggaaggaagagtagccattctgcttgacggcactccgtttgctttgattgttccagtcactttcagcatgatgcttcaatcgcctgaagattattatgaacggtggttcccgagctcgctcatcagattgctgaggttcatcgcagcaatgataacgttattcgcacccgctttatatatatcatttatttcttttcatcctgggttaattccgaccaagctggcgatttcaatttccgggacgcgccaaggtgttccgttcccatctctgattgaagccttatttatggaagtcgcgattgaaattttaagagaggcggggcttcgtttgccaaaaccgattggacccgcaataggcatagtgggcggattaatcatcggggaagcagctgtgcaggcggggattgtcagtccaatcatggtcattgttgttgcgctcacagcaatttcttcatttgccatcccgcattatagcacaggtatagcacttcggatgcttcggtttggcgcgatgttttgtgcggcggtgtttggattgtttggagtcattatgtattatctgctgctaagcagccatgtcgtaaagctaaagagctttggtgtgccatacgcaagtccggcagtgccctatcacttaaaagattggaaagactttgttatcagaatgcctcttttagtcatgaagcgccggcctaaaatgatgaatacagataatacaaaacgggtgaagtgatgaactcgacaggatggtgataaagtctcatgttcagcccaaccagtaaaatcacaaccgctcaggcaacgattatcatcattaattatatgcttgctgccggagttcttacgctccctcggacagtaacagaacaaacacaatctcctgatggatggatttcagttttattaggcggggtcctagcggtaatagccgggatgatgatagttaaattaagccagcagtatcctaaggagaccttttatgaatactcccgacatattgtaggaaaatggctcgggcatctgatcagtattgtttttattacttattttctggcactcggtgcatctgaagtcagagtcatgtccgaaatcgtggatttttttctcctcgaagggacaccgtcttgggccatcattatgacagttctttggattgggctttattcaattacacaaggcctagatccgattgcacggctttttgaaatgatttttccgattacggtcatcatctttttaacgatagccctcatgagtttaggcatatttgagatcaacaatttgcgccctgtattaggtgatggaatcatgccggttcttagaggtgtaaagacaacgaacctttcatttacatgttcagaaattatgttcattttagtagcatttatgaaaaagccgaaaaatgcggtgaaagcagttgtgatcgggacaagcgttgtgaccagtttttatatgattacgatgattatggtcatcggtgcactatcagttgagggagttgtgacgagaacatggccggggcttgacctgatgagaagttttgaaatacctggtttaatatttgaacggtttgaatcatttctgcttgtgatttggattatgcagctttttgccacgtttattatcactttttatgcagcttccctgggagtctcacaagtttttaaaaagaaacccctttcatgtatgtttgggctgcttcctgttatatatatcctctcttgcatgccgaaaaatgaaaatgacgtctttatattgggcgatacggtcagtcatatcgctttgtatatatttggcgctttgccgattttgctgttagtcatttcgaaatggaggaaaagaggtgaaaagtaaactaaaacgtcaattgcctgctatggtcatagtatgtctgctgatgatttgcgtaacaggatgctggagcagtcgggaaatagaagatctcggtctcacattcgctatcgcaattgataaaggaaaagaaacgaacactgaaaaagagttaaaagaagagggcgggagctatccgaaaaaagacaacattacgctgacctatcaatttgttaatgaaaaagcggcaggcgcgggcacaagcgggggaggcggtagcggacaaggagcgcaaaaagcgtacattaatataagtgaaacaggggattcattacagcagatcggaagtgaggttgcattaagacgggaccgagaagtgtttagcccgcatttaaaagttgttgtcatgagtgaagatgtgctgcacacatttcctatcgacgaaatgctggatcaattttttcgtgataatgaaatcaggctgagttgtcttgttttatctgctaaaggggaagcaagagacgctctccagctgaaagagaacggagaaatcccggcttttcggctgattggattaggtgaaaatgaacataaagtttccagaatacttccccctataacactcgcgaaactaattggaaaactgcattctggcagcagttttttactgcaaaatgtggttgcggcaaatggagcggtcaagtattccggagcagctgtaatcaacggaaaatcgaaaaaaatgatcggcactttaaatgaatatgaaactgaggggattacatggattagaggagaagggaaaggcggagttgtcaaaagtcatgataaaaagagccaacagacattagcgtacgatatcaataaaatcaaaagcaaaattcagccaatcgtaaaagggaaagatatttcattccatgtcgatattgaatcagaaggcgatttggttgaaaactggaacacaaaagaggcgttggacacccagtttatagatcgtctcgaaacgactattgaaaacgaggtaaagaaaatagttggtcaggtattaaaaaaaattcagcatgattataaagcagatgttgcgggttttgatgaatcttttagacttacatatcctcacttatggaaaagggtgaaaaataactgggatgacaccttcagtaaagccgacatcacatacagtgtgaacgtcacaattactcatttcggcacggttaaaactcagtaatgaatcccaaggaagagaaggaaacctctcttctcttttttatgcattttttaggatgaagatactttttttggagagatatacacttttcaaatcgaccaatatgctaatataggaattgcttgaaatagaagggacaaggggctgtgaggcagaaaccgatttatgtagaaatcgaaatgaaatctgatctggatacactctgggaatatacacaaaacccatcactgcataaggaatgggatctccggttttcaaatattacgtatttgaatagtcagccatgcgaaaaacagaagtttctttacgaaacaagggtaggctttggattaaaggtgtcaggtacaggagaaaccgtcggtgttttcaacaaatgttcatctgaaaggtcttcttcactggcttttggctctgatcatccattatctctgattcggcatggaagcggctactggaagtatatacagagagaaaatgggaaaatgacgtttttaacacagtatcaatacaaaacagcctacggactgccgggaagatggattgatcgtttattatttcggccgctgcttggctgggcgactgcctggagctttgatgcattaaggctttgggtagagcaaaataaacatccgaagcgcttcattcgatctgctatcatctatgtgttcatgtgtctgtttttcagcctgttttggttctatcaaggctttgcaggtgttaagacaagcatattggcaggaacagcggagataggcttagctattttgtggctgcttcctttaaaaagaaaatggatcattcatggtgtccaggcttgtatttttgctgggtttgcttgtctaggttccgaaatattcatgtgggttctgttgagtgtgttttccgctgcaagcggcgctcttagcctgcagctccccagtgccaggcgcacaaaacgaaagagaaagaagtgacattgtgagttcgatttatgaaaaatcaattattaactatcatttgctgcatcccaagctgcagaaacggtaccaattagacgggtctcatacattcagcgggacgggaacgatgtcagaaataagcggaggctcttttctggttagaatgctgttaaagctgggtgtttttttcagatgcttcttttcagaaagaggcaaagacattccatttacaatacaaaatagaacttgtcttttgaaatcgcaacatacaggaatagaatggaatcgtacatttttctttaaaggcaaaaaacgtttctttgatgcgttaatgatatatgacgagaaagaaaatagaatacttgatttcttcggcaaacctcatctgctgctgtctgttttgacgttcgaggcatctcatgacggctctcttacgatcacatcgggaaagcaatggctattaatatgcggaaaaagaatcccgctgccgaaatggctgaccggtacatccgtagtttgcgaaacgtttgatgaaaaaaagaattgtttcaccattgaagtgcatgtgcaaaatacaattcttggcactcttttcttttataaaggaacgtttcaggaggaagagagagaatcatgaaacgaaatggcatagtcagtgcgctttgttttattggatttcttgcagcagaagcaccggatatttcagtggcagaggcactcgttttgttatccattctatttttcgtgccgggaatttttccttttgtttttcgtcaatctccggttcgtgctgctcagtttatggaatatgggctaatccagtggtatccggcagccgcattctttgcggtgctggctctagtgacggaggttgggggtttcgcacttatctggtggatgtacacagtttttattgcattgtatgcgatcctccgcctttgggaaacaaagatacatagaatcgaagagacatcagttttgttcggccttatttatttggcgggaggaggattttggttttttgcttatgctgcccatttgcagatcatgcaatttggccctctcatcattttgctgactgctgtccactttcactattctgcttttctgatcccgatcttcaacggtttactcggcagaaccattagaaaacatcggatgttgtacagttggataacatgggtgatttttctttcgccccttcttatcgcactgggcatcacatattcaaaaacacttgatgtcattgcggttagcatttatatggcggcgatttatcttcatgcatttttggtgttcacggcagcttttcgcaccaagacggggacatttcttattcggctttcttccgctgttttaatgataacgattgctttctcgatgatttattcatttggtgtatttcggcaagaagttacattgaccatcaatcagatgatttggattcacggttttgtcaatgcgtttggtgttatcttgcccgctctcatagggtggagaatagaggatgcgaaaccttttgatgcagacagtgtaaagacattcagccgtatctacggaaaaagaaagattggagaagaatttttagctaacattcaagctgaaaataacgctcggtacagcggacttgtggatgatatgggcagcctgcgttcaaaagatttttcaccagaaaaactggagccgctcattctttcgttttatgaacaaaccatcgaatacaatattaaagcaaaagtaacatggagcacgtggtttcggccgcttgcaattatttacgaatggttcagcagaagaatcggccaaatacatctttcgacgaaccctgactggtataggatgtacagcaagataagaggtgttcattctaaaaaagacggaagggaaagagtacgtgcctggattagaacaaatgaaaaaaacgaaaccatttttaccgctctttattcagtgtatcgttcaaatggagaggggtatatgaatatttctttaccgcttccattcagcagcatgacaggtattttaaaaccatatcatcaccaggagaagctggttttaacaagcaggcggagaaaaagcagagcgggggatgagggaatttatctgcaaacaagagcgggaacttgtccgcttcctttatctgaaacctttctgatagaagctgcacatgacaacaaattaaccgctgttcatcatatgtggctgtttgaaataaaatttctaactgttcattacagcattacacatattaaccagcctattgaaagaacctaacacaaagaagaagcttcgtctgccagttgctgcatttcaaaattctgcaccgcatcaagacaggaaaggaagggtttatggtgttttatatcagtttatttctgattctttggctggctgcggggtttgcagtgggaatgaaacaagtgtatgtcgatcagctgtttgataaaactgtgatcgaaaggctggaaaaagaagcgaatgatcatggacaagctgaccggatgatcaaacagcgcgccctttatattgcagcagtgacattaagcgggtttatttctgtttattatgaaatgaaaacaatcccgcaaaggcgaaacataagaaaaattgaaaaaaacatcatgaaattaaatcaagtaaaaaaacgaagaatgaagagaaaataaaaatgcacaggccaaagggcaggtgcatttttgttttgtatggaaatgggggaggtggtgccagcttacttttcataaattcaaaaatgagaagaacagcgcccgggctaatggtatataatattgtgaatttaacaaaaatttaacaaggaggacgagagaattcgtgcttaagcctcaaagagacctacatcctgttgatttggacttagaggcggagtagatgaaaccggccaaagtatccctgctccgccgtttgctccattccttgaagcatgttgattgtaacatagccaaacgttttccatcaactattaaaattgtaaaattattgtttatttttatggtatttactccgatttcttcaatttctgctgaagatgtataccagaattttgaggaattaaaaaacaatgaagatccttctgattacgacgttgttacgaaagaaaacggaagccctgttcttgttttagccattcacggaggaggtattgaaggagggacaagtgaagtagcgagagagctcagcaaagagtactcgatgtatttatttgaaggcttaaaatcggcaggaaactcagtcctgcacattacgagcacgcactttgatgaacctcgggcccttaaaatgacgggaaatcatgaatatgtcatttcattacacgggtacgcagaagaagatcagcagatcgaagtcggcggtacagatcgcgtaagagcggcagatttagttgagaaattgcagcatgccggttttcctgctgtattgctcaatacggaccatccacatgcgggcgttagtccgaataacattgcaaataaatcaaaaacaggtttaagtatccagatagaaatgagcacaggctttcgaaagtctttgttcggcatcttttctttaaaaagcagagctgttactcaaaatgagaggttttataagtttacagaagtgatgttccgttttctcaaatatagctactgaaaaataggaggcgataagacagcctcctattctttatgcttctcattcgtttcgggaaacagctcgtccgcggcttccgtttgatactgcaacgtgttatctctcgctgacagttcatttcggaaattttcatcaagtacatttttcaataaataccgatgaaaaaagaattcaaaaacagtaagacaggcagcggaaaggagagctgctccaaatggtgagaaatcgtttcttgtttgggttaaaacaaatacccaaagaataacgaatgaaaggccaaagtcagccaatgaagctgtaatattgtttgttctgggtaagacgagcatgtcaccagaaagataggaaacaaaacctaagaaaagtgcaataaacatcacacttaagaaggatgcgtgatagactctgtccaaaatcacatataaaagggcgagagtgaaagcaatctttgaagcaagcgcaatgatatgtttcatttgaccacctaaattgttattttttgaagaaaattcttgggcgtaaacaaatgataaataatgcaattcaaaaccattcataatggtcatgttactattttaaacagtccgtttttgtttacactggtattttttttcagcagtatgaaactttcttatgaaaaaagacgtatatgtggatgatcagctttcaaggggggaatgatttgtggagataaaaggaatcaatcacttgctattttcagtttcgcatttggatacatcgattgatttttatcaaaaagtgtttgatgcaaagcttttggtaaagggaagaacaactgcatattttgacatgaacggcatctggctagcgcttaatgaagaaccagacatcccgagaaatgacattaagctttcttatacccatattgcttttacaattgaagatcatgaatttgaggaggtatcagctaaattaaaaagacttcatgtcaatattctgcctggcagagaacgagatgaacgcgatcgaaaatcaatttattttaccgaccctgacggccacaaatttgaattccataccggaacccttcaagacaggcttcgatattacaaacaagaaaaaacgcatatgcacttttatgatgaaacggccttttgacatcacacaccatatttcatataaggttaaatttaaagaagggtgttggtggagactttatgtttggagaaggtttctacccgattagttcaacgatgccatatcttttgaactgcacaagtgattccgtgaaggagaaattgaaatacatattacattttatatgaagaaagcgagctgttttaacagaaagatgaactaattagactgtgtactaaattttcagtatatttcaattacctcgccccttaataaatatgaaaccgtatccttccacgacctaaaaaatgaaacgtttttaagaagatggcgtctaatattttaaatgttcatattttgataaaagtttcctaaaggaaagaaaatttcttgacttcaacaatcttttggtggataattgtggtgtaaacatgatgttctttttcctcctattcaggctcgcacccaaaagtcagggcgagcctgctttttttgaacaacaaaccccctctccgtaaaggaagagggggttattttatgcatctgatagatcaatagattaatggacggttctgaacacgccaatcactttccctagaatgctgacattctgcaaaatgataggttccatcgttgggttctcaggctgcaagcgaatgtgggtatcctctttatagaatcgttttacagttgcttcatcatcttctgtcatcgcaactacaatttccccattgttcgctgtgttttgctgtttaacgatgacatagtccttatcgagaataccagcatctatcatactgtctcccataatctccagcataaatacatgctcgtctggaggaaccatgcggtctgggagcggaaaatattcttcaatattttctactgctgtaataggagatcccgccgtgactttcccgatgaccggcacattaacgacctggctttgcggaatgtctacttcttcatcaagaatttctattgctcttggttttgtcggatcccgtctgatcagcccttttgtttccaagcgggccaaatggccgtggacagtagagctggacgcaagcccgacagcctctccgatctctctcacggaaggcggatatccttttgatttaacctctgctttaataaaacggaggatatcaagttgcctttttgatagcttcgtcatttttcgcacctcaaaacgtcgattttaagaagattatagcatgattttccttacagtacaaacataggttcgaaaaaacaattgacagaaacgtttgttcgtatatactgaaattataaaaatgcgaacaaacattcctgttggaggttatgatcatgagtaaagaatctattatttttgtcggtctgttcacagtgattttgagcgcggttatccttatgctgtcatatacaagcagcggccaagagcttaatcagtatgttaaaatagaagtccagcaaggcgacacactctggtcaattgctgatcaggtagcagatacaaaaaagataaacaaaaatgattttattgaatgggtagctgataaaaatcaacttcaaacctctgatatccagccgggtgatgagttagtgatcccattgaaaaagaagcatcaggatgcatatgaattagcaactgtaaaatagagaggaaagagagataaaatgaaagcactcatttatgcccgtgtaagcacaaataaagaacagcaggaaacgtcattaaagcggcaggaggaggagcttacggccattgcagcggagaacggtatggaagtggtcaaagtgattttagaaaaagccagcggatatgaaatggatcgggatggtgtatttgagctgcttgatgagattaagaacgctggaattgatgtcattttggttcaggatgagacaaggctcggacggggaaacgcaaaaatcgcactgcttcattgtatttatagagaaggtgtgaaagtctatacaacggctcatagaggtgaactggagttatcggaggctgactcaatggtcttggaaatcgtcagcattgtggaagagtatcagcgaaagattcacaacatgaaaatcagacggggaatgaaacgtgcagtaaaaaacggttttaaaccgcaaaaaaacttaaaaaaccaacatgggaacagtggaaaagaaaaaatagaggtgccaatctctgagatcgtccgcctaagagcgaataaactgacgtttgctgaaatcgcggctaccctaagagggtttggctatgatgtctctaaagcaactgttcaccggcgttttcaggaatacatagagaatgaagagacagcagagtgaatcagttgtaaaactttttttgatctagtactatatagacaaaatgcaataaaggagtttaacatgatttcaaacgcgaaaattgccagaattaatgaacttgctgccaaagctaaagctggcgttattacagaagaagaaaaagccgaacagcaaaagctccgtcaagagtacttgaaaggttttcgttcttctatgaagaacacgttaaaaagtgtgaaaatcattgacccagaaggcaatgatgttacaccagaaaagctaaaaagagaacaaagaaataacaaacttcactaatataagaggaatacggcaatatcgtattcctcttttgcatatactataatcaaaactcttatgtgacaaaattcaacaagtttctctcaaatttaagctgaaacagttgagaaaaagtcgtcagacatttatgatgtaagggtacaacacataaggaaggggatttttatggatacaattgaaaagaaatcagttgctaccattcgcacactgtcaatagacgctattgaaaaagcaaattctggtcacccagggatgccgatgggagccgctccaatggcatacacgctgtggacaaaatttatgaacgtaagtccggcaaaccctggctggtttaaccgtgaccgttttgttttatctgctggacacgggtcagcactattatacagcatgcttcatttaagcgggtttgatcttagtattgaagatcttaagggattccgccagtggggcagcaaaacaccaggacatccggaattcggacatactgccggtgttgatgctacaacaggtccgcttggccaaggaattgccatggcagtcggtatggcaattgctgaacgccatttagcggaaacatacaaccgcgattcatttaacgtagtcgatcattatacatacagtatttgcggtgatggtgatttaatggaaggtatttcttctgaagccgcttcactcgcaggccatcttcagcttggccgtctgatcgtactatacgattctaatgacatctctcttgatggagacctcgaccgttcattctctgaaaacgtgaaacagcgttttgaagcaatgaattgggaagttctttatgttgaggatggaaacaatattgaagaattaacagcggctatcgaaaaagcacgccaaaatgaaaagaaacctacattaattgaagtgaaaactacaatcggattcggttcacctaaccgtgccggtacatccggtgttcacggtgcgccgcttggtaaagaggaaagcaaattaacaaaagaagcttacgcatggacatatgaagaagacttctacgttccgtcagaagtttatgagcatttcgctgcagctgttaaagaatcaggtgagaaaaaagaacaagaatggaatgctcaattcgctaaatataaagaagtttatcctgaacttgctgaacagcttgaactggcaatcaaaggagagcttccgaaggactgggatcaagaggttcctgtgtatgaaaaaggaagcagcctggcatcccgtgcatcttccggtgaagttctcaacggacttgcgaaaaaaattcctttctttgtcggaggttctgctgacctagcgggatcgaacaaaacgactattaaaaatgccggtgattttacagcggttgattactcaggcaaaaacttctggtttggtgtacgtgaatttgcgatgggtgcagccttaaacggtatggcgcttcatggcggtcttcgtgtattcggcggaactttctttgtcttctctgattacctgcgtcctgcgattcgccttgcagcgttaatgggccttcctgtgacatatgtcttcacacatgacagtattgcggttggtgaagacggtccgacgcacgagcctgttgaacagcttgcttcactccgtgcgatgcctaacctttctttgatccgtccagcagacggcaatgagacagcagcagcatggaagcttgcagtgcaaagcactgaccacccaacagcgctagtgcttacacgtcaaaaccttcctaccatcgatcaaacagctgaagaagcattggcaggagtagaaaaaggtgcatatgtcgtttctaaatctaaaaacgaaacacctgacgctcttctcattgcctccggatccgaggtaggtcttgcaattgaagcgcaggctgaattggcaaaagaaaatatcgatgtttctgttgtcagcatgccttcaatggaccgttttgagaaacaatctgatgaatacaaaaacgaagtccttcctgcagatgtgaaaaaacgtcttgcaattgaaatgggctcatcatttggatggggcaaatacacagggcttgaaggtgacgttctcggcatagaccgattcggtgcatctgctccaggtgaaaccatcattaacgaatacggcttctcagttccgaacgtagtgaatcgagttaaggcattaatcaataagtaagcttttgaaagaggatgagtcaaatcatcctctttttcttgtttatccgacaaaaatagtattggctgtttaacagtaatagacaattctttcttttcttcttttgtataatagagagcaaatgaaatgctgctggaaaaggggatgaaaagatggaacgtcactactatacgtacctgatcaaagaggaatttgccaatcactatttcggccgggaatcggttatgtttgagctgtttcaagactatcattggacaagccttgaaaagcagcagtatgaaatgacagagaaacagattcaatatattacacaaccaatcccgattttacatatgcatcagcggttaaaaatgaatttaaacaagacggattacaggcagctggattatatttatagaatagctttgccgaaagcaaaaggccacgcgacgtttatgatgaaggagcacatgatagaaattgtggcttcgggagattacgaggcagaaacgatattctttgaagtgttaagaaaagtaagcccttgctttttagcaatggatttcaattcgaagcgttacggatggctaaatccggtgaaagaaagaaattttgtctaaaaccgaagaaaaagagatgtaaatgttgtataatagcttttggtttagtacactttaaactagacaacatgaaggaggaaataaaatgactttatgggttggcatcctagtgggcgttgttgcattgctcataggtgttgcactcgggttttttattgctcgtaaatatatgatgagctacctgaaaaagaatccgcctattaatgaacaaatgttacgcatgatgatgatgcaaatgggaatgaaaccttctcaaaagaaaatcaatcaaatgatgaaagccatgaataatcaaacgaaataatacgtaaagattatgatatagagaaacatggttataaaataaaaaacccttatacgggttttttattttgcaatcattcatcacccgctactgctcgaaggcgctgcttttgatattgtatgagaagatggtcaagctcctgactgagctctatcgtaatatgagatgtcattccgttcgccatgacaatttgcagcagctctgctctttttttttcaatttcttttaatagatgctctctaatcacagggatgtatcctttcatacattagatcttcaaagtgaatgtttatattatatccatatttatactaattttcaaatgagaaggagtataatgtctcaatgtcaaattaaattatataagttttttctgaaaatagaaatccttcaagtgaaagtgttaaaaaaatgaaatgattttgtcataacttgaaggaatgtcaaatcatgaagggatgatgacatgggagacgtgaattattttttgacattcggtgcgggttttttatcctttatttcgccttgctgcctgccgctttacccagcttttttgtcatatattacaggggtcagcatggacgatgtaaaaacagaaaagctgctgctgcagaaaagaagcctgtttcatactttgtgttttttgcttggcttttcagtcatttttattgctttaggctatggaacatcttttattggcagcctgtttagggattatcacgatgcgattcggcaaattggcgcgttgcttattattttgttcggtttcattacactcggtgtgttccggcctgaggctatgatgaaagagcggagaatccattttaagcataaaccaagcgggtttttaggatcggtcttaatcggaatggcatttgcagctggatggacaccatgtaccggtccgatattaggtgctgttatcacacttgcaggcaccaatccgggctcagcggtgccatacatgatgttatatgtactcggtttcgcggtaccgtttcttttattgtctttttttatcacaaagctgaagtggataaggaagaaccagcttttcattatgaaagctggcggcgttttgatgattgtgattggtgtgctgttattctttaattggatgagcctgatcattattttgctgtcagatctttttggaggctttactggtttttgacggtaaattactttcgtactactactaatccttttgtttttggtacaataagactattatctgtggaaatcgattgttggaggggaatatgacaagagttttagttgtagacgacgccaagttcatgagagtgaaaatcagagagatcttggaagaggcaaattacataatcgcaggcgaagcggcggacggtgaacaagcagctgacctgtataaaaaactgcgcccggaccttgtgacaatggatattacaatgccggtgaaaaacggcataaaagcgcttcgtgatatcttaacctttgatcctaaagcgaaggtcatcatgtgcaccgccatgcgccagcaaagaattgtaacggaagcaattgagctgggggcaaaggattttattgttaagccgtttgaggaaacaaaagtgctggaagctgtaagccgcgttatgggacattaaagtcatttcttttcaaaatggttttttttattgttttggagtatagtatatagtatcaacactccgagaaacaaaggaatgataagtatgatgattatagtttcatcgattattgctgtgttaatggctgtagctgtgatggtggtcagaataaagtcctctgacaagcctgtttcaccaaaaaaaatcattctcccgccgatttttatgagtacgggagcgttaatgtttttatttccggtattttgggtaactggtgcagagtttttggaagcattcactttaggtgtgattttctctatttttctaatcaaaacttctaagttcgaaattaaaaataatgaaatttacatgaaacgctctaaagcatttgtttttatattagtcggtcttttggtgatcagaatcgtgatgaaatcgatcttgagcacatcaattgattatggtgcactgagcggaatgttttggattctggctttcggtatgattgtgccttggagaatcgccatgtatttatcatatcgaaaacttcataacgagctgcagtcatctaatattcaaatgaattaaaaaacctttcctcttgtcaggaaaggttttttatttgagaagggtctgataaggttccaaatcgatttttttgtcccgcagatgcctttttaagaaggtatggtctcttttaggagttgcgagaatatagcctttgatcataagttgctgatcaatctttgctaccttttcttttaatgcaagctcaccgattttgcctgcgattttagcttttgctgcatctctgaacagctctggcacgggcgcagtcaattcatctagaaactgtttgttttcatcgttccataaatgtctgctgttttcaatatagtaatcctgccaatcaagctctgatctgccgtcctcttttggtaaacgctttaaaaactttcgaaacatgaaaaaaccgccgattgataataagactaccatcatgatcacccaaaacagaataaaccataaaaaccatccttccagcatcaatcattcccccttattctaaccatattgtatacgaagagagattagaagaacacagtaaaaaaagaatagaaaaaagtgatagacgtctagtcaaaagagatagtagatcatattctattgtatagtgaatctgctatttggccatgggagagtcactagagggtatttgacgataaatggacggaaaaaaaagtcactttcataataggggatgaaagtgactttttatgtttagctgagaggaaattgaagagaaaaagaagagccatcttctgtttctttattgacggcgactgtgagtatttgattttcgcattcggcttgaatggttttgtcattaaaataaaaaggaagcatcatttgtttttcaaaagtctgtcctgacgatttgactgttaagatgaactcgcatccagaaagggtaactgttacttgtgtaggctgtaaaaaagtcagatccgcttctataatatactgctgacttgtttcatataaatcaataggcaatgtttcgtcgtaccaggcgaaggggtcttcaaaaaattgccgaagccattcatccatactatcgaaatcattcgcatcgttgcgttttgaatggttcatggaagcattcctccacatatcaaccttgctttacatcatatgcggtggattataaatgggtgaacgcataaaaaaacagacactaaggtctgcttttcttacatatcatggcttgagttgtgcttttgtcttgtatggtttcggttctttacttttttgcttccgcttagaggctcaggttggccgggattgtgtcctttaggggcgtttttatgcatatctttacttgtattcttattggtcataaaatgagaacctccttaaaagagttcggtgttattgattggtttttctttttttgttattttggcgttctgcttcagtcagtacaagctggtcgttttcaatatagccggcgcctttgccttggctttttgcgtcattcattccgttaatgacgtgattcgcttttcttttgaccatcattatcacctcaatcataatatggcttcttttattgtgttatatgagagagcgtaaacagtaaaaattaccggtacatttttctcataagtcgaacttattgtatttaataaaaacattgatatttacttatgtatgattttgttttaatatgaaattgtgagaaaattgtgatggaatgtaatgttcatctgagaatgatctgatctgaagggggattttggagaatggcaaacgagcaaaaaactgcagcaaaagacgttttccaagcgagaaaaacgtttactacaaatgggaaaacatatcattactactctttaaaagcgttagaagattcaggtataggaaaggtttcgaagcttccttattccatcaaagttcttttagaatcagtattgcgtcaagttgacggcttcgttatcaaaaaagaacacgtggaaaatttggcaaaatggggaactgccgaattaaaggatatcgacgttccgttcaaaccgtctcgtgttattttacaagacttcacaggggttccggcagtagtagatctggcttcactgcgtaaagcaatggcagctgtcggcggagatcctgataaaatcaaccctgaaattcctgttgatcttgttatcgaccactctgtacaggtagataaagcgggtacagaagatgcattagcagtaaatatggacttggaattcgaaagaaatgcagagcgctacaaatttttaagctgggcaaagaaagcgtttaacaattatcaggcagtaccgcctgcaacaggtattgtgcaccaggtcaaccttgagttcttggcaagtgttgtccatgccattgaagaagacggcgagcttgtaacgtatcctgatacgcttgtcggaacagactcacacacaacaatgattaacggtatcggtgttctcggctggggtgtcggtggaattgaagctgaagcgggaatgcttggacagccttcttacttcccagttccagaggtaatcggcgcgaaacttgtcggcaagcttccgaacggaacaacagctactgacttggcgttaaaagtaacacaagtgctgcgtgaaaaaggcgttgtcggtaaatttgttgaattcttcggaccgggaattgctgaactgccgcttgcagatcgcgcaacaattgcgaatatggctccggaatacggtgctacatgcggattcttcccagtagatgaagaagcgcttaactacctgcgcctgactggccgtgatcctgaacatattgatgttgttgaagcatactgcagaagcaatggcttgttttacactccagatgcggaagaccctcaatttactgatgtggttgaaattgacctgtctcaaattgaagcaaacttatcgggtccaaagcgtcctcaggatttgatcccgctatctgctatgcaggaaacgtttaaaaagcaattagtcagccctgcaggtaaccaaggattcggtttaaatgctgaggaagaaaataaagaaattaagtttaaactccttaacggcgaagaaacagttatgaaaacgggtgcgatcgccattgctgcgattacaagctgtacaaatacatcaaacccatacgttctgatcggcgccggactggtagcgaaaaaagcggttgagttagggcttaaggtgcctaattacgtgaaaacgtcacttgcaccgggttctaaagttgttacaggatatcttgtgaattcaggccttcttccatacatgaaagagcttggctttaacctcgttgggtacggctgtacaacatgtatcgggaactcaggtccgctttcaccggaaatcgaagaagcggttgcgaaaaatgatcttctgattacgtctgtcctttccggaaaccgtaactttgaaggacgtattcacccgcttgttaaaggcaactatcttgcttcaccgccgcttgttgtggcatatgcgctggctggaacggtaaacattaacttaaaaaccgatccaatcggtgtgggcaaggatggtcaaaacgtatactttaatgatatttggccgtcaatggacgaaatcaatgcacttgttaagcaaactgttacgccagagctattccgcaaagagtatgaaacagtatttgatgacaacaagcgctggaacgaaattgaaacaacagatgaagctttatataaatgggataacgattcaacttacatccaaaacccaccattctttgaagagatgtctgttgagccaggcaaggttgagccattaaaaggactgcgtgttgtcggtaaattcggcgattcagtcacaactgaccatatttctcctgcgggggcaatcggaaaagatacgcctgccggaaagtatttgcaagaaaaaggtgtttcacctcgtgactttaactcctacggctcccgccgtggaaaccatgaagtcatgatgagaggaacatttgccaacattcgcatcaaaaaccaaatcgcaccgggtacagaaggcggatttacgacgtactggccgactggtgaagtaacatccatctatgatgcatgcatgaaatacaaagaagataaaaccggtcttgtcgtattagcaggaaaagactatggtatgggatcttcacgtgactgggctgcaaaaggaacaaaccttctcggcatcagaacggtcattgcagagagcttcgaaagaattcacagaagcaatcttgtattcatgggtgtgctgccgcttcagtttaaacaaggtgaaaatgcggatacactcggcttaacgggtaaagaagtcatcgaggtagatgttgatgaaacagttcgtcctcgtgaccttgtgactgtaagagcaatcaatgaagacggcaatgtaacaacttttgaagcagtcgtccgctttgatagtgaagttgaaattgattactaccgccatggcggcatccttcaaatggtgcttcgtgaaaaaatgaagcagtcctgatgaatcaataggaagagaaggcatttcgctttctcttctttttataacacaatgtgctgcggaggtggcatatgctgaaaaaatggctcgcagggatcctgcttatcatgcttgccggttatacgggatggaatttatatcaaacatacagcaaaaaagaagtcggaattcaagaggggaaacaagcacctgatttttctttgaaaacgctgtcaggagagaaaagctctttacaggatgcaaaaggcaaaaaagtgctgctcaatttttgggcaacttggtgtaaaccgtgccgtcaggaaatgcctgcgatggaaaagctgcaaaaagagtacgccgacaaacttgcggttgttgcggtaaatttcacttcagctgagaaaagtgagaaacaggtccgagcgtttgctgatacgtatgatttaacattccccattctgattgataaaaaagggatcaatgctgactataacgtgatgtcatatccaacgacatatatcttagatgaaaaaggtgttatccaagacatacacgttggcaccatgacaaaaaaagaaatggaacaaaaactggatcttgattagattcagtttttttatgctcagatatgcttacaagttttcagaattggaaaaaataaaagaatatgcggaggtgagaagcgtgaagaagatgagaaaacgttcttttcatgagctcgtcatggaaaacaaaaaagagctgatgaccaatacagagtatttaaatcagcttgaggaaaagcttgaacagcgatttaagcaaaaataacctttaatttgtattcatgtttacccctccttttgagaaacctatctgttgaggagggataaacatgggaaacaacaagaaaaacggtcagcctcaatatgctccaagccacttgggtacaaagcctgtaaaatataaagccaataaaggggaaaaaatgcatgatacttcaggacagcggccgattatcatgcagacaaaaggcgagtagcgaaaattcgagtttatttctaggaggtacatccgaatgacaaagaaccaaaatcaatatcagcagcctaatcctgatgatcgctctgacaatgtggaaaaattgcaggatatggttcaaaatacaattgaaaatatagaagaagcagaagcatcaatggagtttgcttcaggagaagataaacagcgtatcaaagaaaaaaatgcaagacgcgaacagagcattgaagcgtttcgtaatgaaatacaggacgaatctgcagcgagacaaaacggataccgttcttaaaaaaccagggaaacctggtttttttctttctgatttgattatggtaaaatggggctaaattgacgttaagggagcagagtaatcttgcatgtatcaaaaaaagaaatagaagtgcgttatgcagaaacagatcaaatggggattgtctaccacgcaaattatcttgtgtggatggaggtcggcagaacggccttaattaaggacttaggctttttatatagtgatatggaaaaaagaggcgttctgtccccagtcgttgatatcaatatttcctataaaaagccgcttcattacggagaaaccgcggttgtacatacatggatagaggaatataacggatttaaaaccgtctatggttaccacatctataatccggccggtgagctttccatcaaagccacctcatctcatatttgtgtggataaagaaagctttaagccaattcaattccgcaaagcttttcctgattggcacacagcatatgaaaaggccaaaaaatagggaagtgaacgggatatggcgtttggtgtgaaacgggaggaacttaaccgatggaaacaagcagtgaaaagaggagaaatcgcatttttaacacattactggctggatgaccgatttccggaagcaaggactgtaacaaaagccggctgtgcagacattgataagctggttcagtggggggcggcgtacgggttaaaaaaagaatggatccataagaaaagtgaatttcctcacttcgatctgctgggggaaacacaaaaatatattttggaacaagaaaacctaaccgatcatcttatacgatttcatttgtaaaaaaagaacgcacatgatgtgcgttcttttttattggtattcaaaaaccggttcatcagcgtcttctgaatagctgacgagaaggtcgtggttatcaaagtaccataaatcactttcttcaataaagaaggtaatgccgtcagcttctgcagtgactccagcctcttgtggggcatctttcgctacaccgagagaaaaacccttttgaacgttgctgcagcctccatagcggacgaaaaagcgaacctggtctccgctttccaaatcgagttcttctttataccagttcaatgcgtcttcgttaattgtcatattcataacagaacacccctttgttcttcatttgaattttctctattataaacgtattaggctattctgtgtcaaaagagaagttttttaagcttataaccattttactttaggttctgttttattgataattcgtttaatgttcgctcggtgtctgtatatcacaaaaatagtgagcagggtaacgacaatcaataaatacgtatcatggacaaagaaactatatataacagtatagatccctgttaacatcgatgagagagaaacaaatttagtcaagtataaaaagatgaagaataccgcaaccatcgtgataaataacaggggtgcgtaaaatagcaaaacgcctcctgatgtcgccacggctttaccgcctttaaatttggcgaagatgggaaacacgtggcctaaaaccgcaaagactcctgcaagaagcgggtgaatatcaacatgcatgagaaaaggcaatgcagttgccagtgtccctttcaaaatatctccggctatgacgaccgaaccagcttttacacccaatgtacggaatgcattggtagcgcctaagttgccgcttccgtgctcccgaatatcaattcccttggcaagcttgcccacaattaagccagatggaatgctgcctatcaagtaggccaaaataatcaataaagcaattaacatctacatttctcctttttcaaattcccttctttttattttaacatgagatgtcatgatctgatgataagtttttttgtaaagtttgcttacaaatccaatcaaacatgcatcatattttgatttctcctgttttgatcgtgtaaaataagtaaaaaaggagtgacacacgatgcaaaacccttctaaagcggaaattaaagagattcttcaaagaagcaaacgtatagcggtagtagggctttcagaccgtccggatagaacatcacatatggtttcaaaagcaatgcaggacgcgggttatgaaattatccctgtgaacccgacaattgatgaggccctaggtgtcaaagccgtttcatctttaaaagagattgacggtccgattgacatcgtaaatgtattccggcgctcagaacagcttcctggagtggcggaagattttttagagacagatgcgccagtattttgggcacagcaagggctagttaatgaggaagcataccagatgctaaaagaaaaaggcagaacggttatcatggatctgtgcataaaagtggcacacgctgtaacaaaataggtgcagaactgcaaaaatccttgtaaattcaaggatttttgctttttaattttaagatattgtttgcgtattacggtgaaacagatacaataaagcttgaacagctttttttgaataccttgtccagctgggtttcggccgttcgatttgcgaaggtctgctgctttatatataataaacaaacatacgttcttatggtgtaaaaacagcactagccgatgttttgagaagaactgattcgttagctctatgttgcgattgcaaacatattggttataatgaggagtccaaggcagtactggctcgaggcgaggtttataaaaaatatcttatatacaaatgatgtgtaacactgaaaaagagaaagacaatgttagtttttgaaaggggtttgtacgtttggctagaaaacagcaatttgattacaacgaagatgccatacaggtgctcgaaggccttgaggctgtcaggaaaaggccgggtatgtatattggctctactgacgcgcggggtttgcaccacttggtttatgaaattgtagataactctgtcgacgaggtgcttgccggccatggagatcacataatcgtcaaaatacataaagacaatagtatttctgtacaggatagaggccgcggcatgccgaccggaatgcataagctcggcaaaccaacccctgaagtgattttaacggtgcttcatgccggaggaaaattcggccaaggcggctataagacaagcggcgggctccacggagttggtgcatcagtcgtgaatgctttatctgaatggctgacggttaccattgagcgggacggttttgtctatcagcagcgatttgaaaatggaggaaaaccggttacatctctcgaaaagatcggcaaaacaaaaaagacgggaactcttacacactttaagccagatccaacgatgttcagcacaaccacttataattttgaaacgctctctgagcgcttaagagagtctgcgtttttgttaaaaggactgaaaattgagctgattgatgaacgcaatgaccagcatgaggtcttttattatgaaaacggcatagaagcgtttgttgcttacttaaatgaagaaaaagacgtcttgtctgaagtggtctcgtttgagggtgagcatcattctatagaagtggactttgcgttccagtttaacgatggttattctgaaaatattttgtcgtttgtcaacaatgtcagaacaaaagacggcgggacgcatgagtcaggtgcaaaaactgcgatgacgcgtgcttttaatgaatatgcgcgaaaagtggctttgctgaaagaaaaggataagaaccttgaaggcaccgatataagggaagggctttcagccattatttctgtccgcattcctgaggagcttcttcaatttgagggacaaacaaaaggaaagctcggtaccagtgaagcaagatcagcagttgatgcgattgtttcagagcagcttgcttactttttagaggaaaatcgggacaccgcaacgcttcttgtcaaaaaagcaatcaaggcgagccaggcgcgcgaagcggcacgcaaagcccgtgaagaagcaagaagcggcaaaaaacgaaaaaaatcagaagcgactttaagcggaaagctgacgcctgcgggttcaagaaacccggcaaaaaatgaattgtatctcgttgagggagattcagcaggcgggtcagccaagcagggaagagaccgcagattccaagcggtactgcctttacgcggtaaagtcattaatacagaaaaagctaagcttgctgatatctttaaaaatgaagagatcaatacgatcattcatgcgatcggcgggggagtcggggcagatttctcaatagatgacatcaactacgacaaaatcatcattatgaccgatgccgatactgatggcgcccatattcaagtgctgcttcttacctttttctatcgctatatgaaaccgctcattgagcatggcaaggtgttcattgcgctgccacctttatataaggtcagtaaaggaagcgggaaaaaggaaatcattgaatatgcatggtctgatgaagagatgggtgatgtcctgaaaaaagtcggcaaaggctataccattcaacgatataagggtcttggagagatgaacgcagaccagctgtgggaaacgacgatgaatccggagtcccgcacacttgttagggtcaaaattgacgatgcggcacgtgtagaaagacgtgtgacgacgttaatgggagacaaagtagagccgcgcagaaagtggattgagaaaaacgtcgctttcggcttagatgaagaaagcaatattttagaaaatgaaaacttatcggtcgctgaggaggtttaatgattgtcacagccagaattatttcatgatttaccattagaagaggtgatcggcgaccgttttggacgctacagtaaatatattattcaagacagggcgctgcccgatgcgagagacggattaaagccggtacagcgcagaattctgtatgcaatgcatacagatggaaacacgtttgataaaaacttcagaaaagcggccaaaacggtcggtaacgtcatcggtaactatcatccgcacggtgacagctcggtttatgaagcaatggtgcggatgagccaggattggaaagttcgtaatgtgttaatcgaaatgcatggaaacaatggaagcatcgacggagatcccccggcagccatgcgttatacagaggcacgattatctccgattgcatctgagcttcttcgggatattgacaaaaacacggttgaatttgtgccgaacttcgatgatacaagcaaggagcctgtcgtactcccggcgatgtttcctaacctattggtcaacggatctaccgggatttcagcaggatacgcgaccgacattccccctcatcatctgggagaagtcattgatgctgtcattaagcgtattcaaatgccatcttgctctgttgatgaacttatggaagtcattaaagggcctgattttccgacaggcggtattattcagggcgttgacgggataagaaaagcttacgaaaccggaaaaggaaaaatcattatccgcggaaaggctgaaattgaaacaatcagaggcggacgagaacaaattgtcattactgaaattccatttgaagtaaataaagcaaaccttgtaaaaaaaatggacgagttccgtattgataaaaaggttgaaggcatctcagaggttcgtgatgaaacggatcgaacagggctgagagtggtcattgaactgaaaaaagaagctgatgccaaaggcattttgaatttcttatacaaaaatactgatttgcagatcacatataacttcaatatggtggctatccataaccgccgtccgatgctgatgagcctgccgtctattttggatgcatatatcggacaccaaaaggaagttgtcacaaaccggtccgtttatgagcttcaaaaagcaaaagacagacatcatatcgtagaagggctcatgaaagctttgtctattttagatgaagtgattgcaacaatccgttcttctagcgataaacgtgacgctaaaaacaatttgatcgcgaaatatgaatttacggagcctcaggctgaagccatcgtgtcattgcagctatatcgtttaaccaatacagatattacagcgcttaaggaagaggcagaagagctcggtaaaaaaattgaagagctcgaatctattctgagcaatgataaaaaactgctaaaagtgattacaaacagcttaaaagcattgaaaaagaaatatgcagatacgagacgctccgtgattgaagaaaaaattgaagaaattaaaatcaatctcgaagtcatggttgcatctgaggatgtatatgtaaccgttacgaaggatggttacctaaaacggacgagccagcgctcatttgccgcttccaacggtcaggacttcggaatgaaagatacggacaggatgctgcatcagtttgaaatgaatacgacagacgtgctgctgctctttacgaacaaaggaagctacatctattgtcctgttcaccagctgcctgatatcagatggaaggacatgggccagcatttttcaaatctgatcactattgaccgtgatgaaacgattgtaaaggccataccgataaaagaatttgatccgtcggcatatcttctattctttacgaaaaacgggatggtgaaaaagacagagctcacccattataaagcacagcgttattctaaggcgcttgtggccttaaatctgaagggtgaagatgaactgattgatgtacatgtaacaaatggggaaagccagatctttatggccactcacttagggtacggcctatggtttggagaagacgaagtgaatgtagttggcgcacgtgcggcaggtgtcaaagggattaacttaaaagaggatgactttgttgtctccggtgagatccttcagcaatctgattcaattgtcttgttcacacagcggggagcggtaaaacgcatgagtctttctgagttcgagaagacatcccgcgcaaaacgcggtgtcgtaatgctaagggaactgaaaaagaatcctcaccgtgttgtagcactgttcgcttgcggtcttgaacagcgactaatggcagaaacagaaaaaggcgacagaaaagaactgcaggcaaaagagttgcggacaaacgacagatacagcaatggctctttcttttttgatgaagaggaatcaggcaaggttacagctgtttggcgacttcatacagaacaataataaaaaacccgctcatatagtatgagcgggtttcgtttgttttttatcagctttcatggttggtgaatagatctgttacagcatgaatgacttcaatcccctgccatacaaataaattcagcgctgtgaaagaaaataagcctaaaatcaccattcttaagataaacaacatgtttaacagcctcctcatattttcgttacataatcgggtgatgttgaacatgaagtttgccgaaataagacgattgataaaatttggccagtataaagctttttttccgctgacgtctgcgggagtatcccgtacttttgctttcagcggtcagcagcagaacagccattgcccataaagcggtcagcgtaaatgcccctgtgatggatttcttctcatcatcagcattttggccgactttcatctcatgcatttcctgctggtcggctacggctttataatgatggccgatatcaaaggcgtggggaattgagaacaaatgaaaactggcaatcgccaagaataagatggatgctttcaatatcgttacttttttcaaatgatctccccctcctttaatattactgaatatttttataataataccccaatccatcctaaaagtaaacgtgatttattaaatttaaaaataaatttaaccttgttaagtatatatctttttgcttatttttgaaagagaaaacttcttttattagcgtatgtatacccggtttatggtgtgaataaaaacatattttaaatgatatgtttgttgtttagggtttattactttatttatgtgttaaatcaaagggaaaggcaagagaatgggaagaaatgattacattgttaatagggcactcttttttaaaagccagcttgcaaggaatgtttttattcgtaggaaaataatagagaaggggtcgacagagtaacatctggctacgacaatattcttctcgaaaaaacttcctaattcgtcatattgtgatataataaaactcgttatgttaaaaaatctaacatcaaaatcgaattcgtgttgaattgatgaaaacgggaggtaaatatggagtcttttttcaatagtttgattaatattccaagtgatttcatctggaaatacctattttatattttaatagggcttggattattttttaccatacgttttggttttatccaattccgttattttattgaaatgttcagaatagtaggggagaagccggaaggaaataaaggtgtttcatctatgcaggcattctttatttcggccgcatcccgagtcggcacagggaatttgactggtgtagccttagcaattgcgacaggcggaccaggcgctgtattttggatgtgggtagtagctgctgtaggtatggcttcaagttttgttgagagtacgttagcgcagctttataaggtgagagacggggaggatttccgcggaggcccggcctactacattcaaaaaggtcttggagccagatggcttggcatcgtttttgcaatcttaattaccgtctcattcggcttgatttttaacgctgttcaaacaaatacaattgctggagcattggatggcgcattccatgtgaataaaatagttgtagccatagttctggcggttttaactgcgtttatcattttcggcggtttaaaacgtgttgtcgctgtttcacagttaattgtgccggttatggcaggcatttatattcttatcgctttatttgttgtcatcacgaatattacggctttccctggcgttatcgctacaattgttaaaaatgctttaggttttgaacaagtcgtcggcggcggaataggcggcatcatcgttatcggtgcgcagcgcggacttttttcaaacgaagcaggaatgggaagcgcaccaaacgcggctgcgacggctcatgtatcccatccggcaaagcaaggctttattcaaacattaggcgtatttttcgatacatttatcatatgtacgtccacagcatttattattttgctgtacagtgtaacaccaaaaggcgacggcatccaagtaacacaggctgctcttaaccatcacattggaggctgggcgccgactttcatcgcagtcgcaatgttcttgtttgcattcagttcagttgtcggcaactattattatggcgagacaaacattgaatttattaaaacaagcaaaacatggctgaacatttaccgtatcgctgtaattgctatggttgtgtatggatctttatcaggcttccaaatcgtttgggatatggcggacctctttatgggtatcatggcgctgatcaacttaattgtgattacgctgctgtcaaacgttgcttacaaagtgtataaagattacgcgaaacaacgtaagcaaggacttgatcctgtgtttaaagcgaaaaacatcccagggctgaaaaacgctgaaacatgggaagatgagaaacaagaagtataatataaatataatgaaaaagctgcattcaatagttgaatgcagctttttcattattggaaataaatttaatttttcgactcgaatgaaaaatgacgtgtaaagtcccaattcagtccagttttctttgttctatatgtgtcatgtgtgtcttattcattggaggtagagcaaattgacaggcttttaaacctcccaaaaacaagaaattaggttgatagacaatcatgagaaagatttttacaatgagttcgtgctcataagaagtgtagagccaaaatgatgcgaaggaggaaaagatcagatatgaaacggtcaatctctatttttattacgtgtttattgattacgttattgacaatgggcggcatgatagcttcgccggcatcagcagcagggacaaaaacgccagtagccaagaatggccagcttagcataaaaggtacacagctcgttaaccgagacggtaaagcggtacagctgaaggggatcagttcacacggattgcaatggtatggagaatatgtcaataaagacagcttaaaatggctgagagatgattggggtatcaccgttttccgtgcagcgatgtatacggcagatggcggttatattgacaacccgtccgtgaaaaataaagtaaaagaagcggttgaagcggcaaaagagcttgggatatatgtcatcattgactggcatatcttaaatgacggtaatccaaaccaaaataaagagaaggcaaaagaattcttcaaggaaatgtcaagcctttacggaaacacgccaaacgtcatttatgaaattgcaaacgaaccaaacggtgatgtgaactggaagcgtgatattaaaccatatgcggaagaagtgatttcagttatccgcaaaaatgatccagacaacatcatcattgtcggaaccggtacatggagccaggatgtgaatgatgctgccgatgaccagctaaaagatgcaaacgttatgtacgcacttcatttttatgccggcacacacggccaatttttacgggataaagcaaactatgcactcagcaaaggagcacctatttttgtgacagagtggggaacaagcgacgcgtctggcaatggcggtgtattccttgatcaatcgagggaatggctgaaatatctcgacagcaagaccatcagctgggtgaactggaatctttctgataagcaggaatcatcctcagctttaaagccgggggcatctaaaacaggcggctggcggttgtcagatttatctgcttcaggaacattcgttagagaaaacattctcggcaccaaagattcgacgaaggacattcctgaaacgccatcaaaagataaacccacacaggaaaatggtatttctgtacagtacagagcaggggatgggagtatgaacagcaaccaaatccgtccgcagcttcaaataaaaaataacggcaataccacggttgatttaaaagatgtcactgcccgttactggtataaagcgaaaaacaaaggccaaaactttgactgtgactacgcgcagattggatgcggcaatgtgacacacaagtttgtgacgttgcataaaccaaagcaaggtgcagatacctatctggaacttggatttaaaaacggaacgttggcaccgggagcaagcacagggaatattcagctccgtcttcacaatgatgactggagcaattatgcacaaagcggcgattattcctttttcaaatcaaatacgtttaaaacaacgaaaaaaatcacattatatgatcaaagaaaactgatttggggaacagaaccaaattagttaagcttttttttggcggacatcagtaacgatgtccgtttttatcatctaataggaggtttgcgttgtggatgaaatactgaaacagtatatggtgctgtataaaaaaatgagtaatatgataaatggtcccgactatccaggtaaggaaaaagacatccagcatcaaaaagatcagatcgaagtttacgaaaaacagctgcagcaaggattttctacagattatgactatgatgtgtttgctgattctgttatcaaatgcgcatatggcgatatgacgctggaagatttagaagccgtttattatggattgacaacaccatttttttgatttgtcattcagcagtaaaatttcaatttctgtctcactaacttaagtatactttgatattgagacagaaatttatttattttgtttacttcctagaatatatattatgtaaactagaaaagatgaagattaaagctttgctgtttttatgtacatcctttcttcttcctgtaattcagcaacaaaataaaaaagcgatttcccaatcggaaaatcgccaattcagacactctattatttatgagtgtctttgtgctcttaacgatttacaacaaatgttgttacgctttgagctggaagatgggcccaaaaatgattgcctgatacagtgagattcgttccaggttgtagattgctgctgctgctcgtgatccatctagatacgtttgaagcagatccattctgcaaaacaaagttttggttgacccctgtgttgcttttattgatagcaacaataacgaccttgttgtcacctttataggctgacacgtaaacgttcgcattagggtttttcgttgcatcaatccttacatagccgggacgcacaaactttgagaaatgagccatattgtagccgcgtttgctgatcgtaccatcttctttcataggtccatatgatcttcgaatgtaccaccatacataagcttgaaagtccccctctaccatcgcattgtgaatatgctgtgaaacatccaatgcctcaggccatcgatccgccgagttgttatcactgtttggatagtatacttccgtcatccaaaggtccttccccgctcctttttgtttgaaaagaggataagggaattggctgacctgggtgccgtacaggtgagttccgagaatatccatattggcaagagcctgcggatcgttcaagatcgggtccgacaaattcttcaagtattgaaatgactcaggcgcaatgacgcgggcattgatcgagccggcgttttctctcataaagcgaagtatttcttgcggcgtccaccacgtccactcgtgagcgtaatcaggctcgttttggaccgaaatcgcgtaaagattcacaccattattcttcatgaaggtaacaaaatcgttaagatgctgcgcgtatgctgcgtacttgttgtatttcagccgcttagctgatgtgtcaccattccgattgaaggtctcaaccatatcacttggaggattccagggagatgcaaaaacgattgccccatgtttgaccgcactcttggcagtctccacctctttataccaattatttcgattttcatctacatgaattcttaagattgaaaatcctaactggttctgtccattgccaaaagcagtttctctttgagctgctgtaagatccccagcccaagcgggatgattcatccctccaaaaccgcgaatcacttgtttctctgcagatacattaactgttacatcactggctgccaaaacttcagtagcgcctggccctaacatgactgacagcatagtgaaacatactaatagtacacaaattgttttttttatgcgtggaatcatttattcctctccttcgtcatgtgtcttttacggtattaaaaaatctgcatggcatatccataatggcgggctgttccggtgatggcccgtacttcacccgcctcgtttttaagcggtcccattacgagtcctatctttgcgtaaactgccagtaatcaaaattaaacaagtttcctgtacctgttccggtaaatacaaagaatactttgtgcacaccggttgccccgcttacttcagtttctatttctctccacgtttgcgctccacctgtggaaggtacattcagagttccaacaagcttaccatcagcactgtcgaggcgcacttctatttttccgcctaaagtggatgctacatttgctttaaatgtcctggcaccgcccgctccgaagtctgcatttcctacagcaatccagtctccattttgaatgcttgttacatgctgattatttactggcccgccgggtgctgtggacttctctgtcaaaatgcgtccattccaagcaaacgtttcagcttctacccggttataaggattcaaattggaaagctgtgttacacctgcataatttgctgctacctcttggatggatccatctgggttatgcaccagcttattaatatggggagaacggtatcctttgccggccccgaacagagcggaactgacagtttgcgcatggtacaccacataccactcgtttttaaaattgaaaacagcatgatggttgtttccgccgcctccgaaaaatgcacccggatttttcaggaagtgccctctatatgtaaaggggcccatgggacttgaactggtcatgtagccgatctcacccgggggtttatcggccggatgtgtgccgccgaaattgatgcaataggagtaataatatgttccgttatacttgtgcaatccggaatcttcaaacatgaaaggcgcatcaattgtagatgcacttccctcaacactcgtcatatcaggccctaattttatgacccttgccgttttaggattggcccattgtccctgcgttggatttgaaccgccaggaacgcctccgccggcatacaggtaaccggttccgtcgtcatctacaaatactgccggatcaaaaagccatacaacacctgacattcctggcgtacttggcgttacgagcggttttccgattgggtcggtccatggaccaatcgggctgtctgcggtgagaaccccgatacctccgccgctgtttgcgaaataaaggaagaatttatccttgccattaatttttttaactgcgattgacggtgcccaggatgcacctgcccattttgcaattccacggcctccattagctccattggcacctgctaccggaatggctccgtggtctgtccagttcaccatatccgctgaagatatgacgaatactctattcaaattggcaaatgaattatctttaatcgttccgttgctattatattcatagtcatcacttgacatataaatgtagactcttccgttataggtcagcgcaatcggatctgctcctaaatgatggtcgataagcgggtttgaattccctatatgttttgcaattgtagtacttgtggcagcatacgcagacttcccagataagcagctcaataataaaactagaatccataaacatacgctacactttttcctcatcacttcacatcctcctttttctttaaaatgggggattttcttttggaatttgatgacaacaggtcacgaagattgcacgcataaagtagccggaagctgtttagcaatgttcccagttgttctgaaagctcatcttcatgtgtctccattctctcttttcttcgaggagatcgcaccactccttcaaaattgttcaaaaaaactttcccattcctagcgaccattgtccagaaaataaaaagacaggattgttcatggcctcccactaatcacattgaacggagattacatcattatccaagatatccctttatctaacatcctacatcattaaaaaaattgtgtatagaaacttttggaggagttagtgttcgattctacaaaggaactggatacatttattcattgataagatggggctaacactccttttatatttttatgtaaagatagttttcagacacaaaaaaacagccgtcaatgcggctgttttttcaagagtataagaactattgagcggtatacccgctttttcatgttttgttcatattttattaattgtttattcaacactgtccgctatagtaatccatatcaacaaatatgactgccactcgcatcttttatgaagggaggttcgttacgctgaaagaaaaaataaagacattaggccgtttttgcaccgtaggcgtcggcaatacgctgatagattttggtgtcttctttcttcttaccgcttgtcatgtctcttatctgccggcgcagatctgctcctatactgcaggtatcgtcaacagctatgtgtggaaccggaattggacgttttgtgtgaaaggtaaggctgacgggaaagagatcgtgcgttttctcatgattaatattgccgcgtcggggatcacctttttgctgctttatttgtttcaaaattgcggctgctcgcttttggtgagtaagctcgccgccactatcggcggaatgatgatgaattttatcggaaaccgaatctgggtatttggagattcgctgaaaaacatacaggatcaggagtgaagatgaatgagaaaaaaagtgagaaaagcggttatacccgcagcgggtttaggaacgagatttctgccggcgacaaaggcgcagcctaaagaaatgctcccaatcgtcgacaaaccagcaatccaatatattgtagaagaggccgcagagtcaggaattgaagatatactgattattacagggagaaacaaacgctcgattgaagatcattttgatcggtcggcggaattggaattcaatctccgggaaaaaggcaagacggagacacttaaggaaatgcagcagattgccgatttggccaacattcattacatccgccagaaagaaccgctcggattaggccatgcggtgctgtgtgcggagcattttatcggagatgagccttttgccgttctcttaggtgatgatattatggtgtctgaaacaccggctcttcggcaattaatggatgtatatgacgtttatggcacagaggttgtcggtgtacagtcagttctccctgaggatgtcagcaaatatggtattataaatacatcagggtctcaagggcatgtatacgaagtgaacgatttagtggaaaagccttctcctgaagaagcaccttcggaaatcgcagtaatgggacgttatgtgctgaattcttcgatcttctccgttttgaagacaattggcagaggcgcgggcaacgaaattcagctgacagatgcgcttcgtgaggtttgccgtaaggagccgatccatgcccggctgctggaaggaaatcgatatgacattggcgataagctgggctgttttaaagcgagcaccgaaatcggcttaatgcgtcccgaaatgagatctcagcttttggcctatttagaagatgtgatcaaacgggaaacgaaagaaatgctgcggtaaaaaaattgtaaccatcttgctcgtcaatcagtcatataatagtgaaaaagattaggacaggttgtgaagaatgtgggcagtttgataagcgaaattttaacatggctgacgaacatgggatatgcgggtattgcgattgggttaatgattgaaatcattccgagtgagattgtattagcttatggcggctatatggtatcggagggcacgattggatttattggcgcaattattgcgggtgttatcgggggcaccattgcccagatctttatttactggatcggtcgctatggcggcaggccatttctggacaaatacgggaagtatttattgattaaaaagcatcatatcgatatgtcggaaaactggtttcagaaatacggcgccggagttgtcttctcggctcgttttataccggttgtcagacatgccatatccattccggcaggtattgccagaatgccttttctcaaatttgtggtactgactgtgcttgctatcattccatggtctatcctgtttgtttatttaggcatacagctaggaagccagtgggatgatgttgagaatatagcaggcacttatacaacaccgattatgatattggctgttgtcgtgatagccctttattttgtgattaagaaacgtacagccatatttaaacgatagctagcggatatgcataggggtgactgacgctcccctatgcatatttttttacttgcgatgttgatttgccagcttcagattctccgctaaaaatgcgacaaacacttcatcccgcacgagcgatgcggcataatttctcttaataaaccattctgcctcttcaaacgctgcgaatgtttcgtcttgggtttctccgttaatttgaatattccattcgttgtctaaagggaaaagaaaaaatctcatttgtgcgcgattttcatataatgatccattcgcagatccctttagattatagatgttacggaaggcatccggccgtacaggatcaatacggaaagcttcagctacaaacaactcgtatacttcatcggttattgaacagccggacgcttttgcatgccctccgccgccatatcggccggcgatttctgacacatcgatgtaatcatgaatggtgcggagactgactcgttttgaccccatgctcaaaatcgcaatgtaatcgaggtgcgggttatctttccctagcctgttccccagctctgaatggtacgattcagcgtgaacgatgcctacacagtgttcgtgaacaaaggtttgtaccatttcccttttctttctgcggaggtagcgctcgattttttcgtcttctaaatcaagcagtttttcttcaaaatcatcgaagaaaaattcgtcatgcgtggaaaggcgctggatcatttttgcttcaaattcatcgattgacagcaaaaagaaaagatcattaagccgcttcgcctgtttttgatcgtaccgctcccactcccatgtatcgtattggcggacgagctctgtgaattgatctaaggcgtttgtcggtttcatgaagccattttcaacgagatagccatataaaagcgatgtcgcggatgtgagccttccatcatcgtattccacctggacaaatccccattcatgctcattcaaatgaagggctgttttatgatggtctatgagcttcactttgccccctgcatgaacatactcattcaatctctcttcgttttcttcattgacggcgagatcggtgatgaataacgcgtcctgtctgttgctctccttcgctttttctaaaaagtactgcacctgtgcgtttaagccgttgacagagttataccggacctctacgtcttttccgaacgccaattttgctacgattccgcatcctactccgtccaagtcgttatgtgaatataaatgatacacaatgtaggcccctttttatgataaactgacaattgccgctagaggtgcggcagcctttatttactattctaaaaaaccaagcgttttatgcaatggtaattagttgacataatgttgttattgtaaatatacaaaggagcgctttttttgcgctcctaagttcttgcttttacaccggataaaccggatgctttcgattggtaaatgtcatttcctttgtcatgtatgccttgagccgtttggccagctcatcacgcagcgaattggctgggataacagcatcaatgatcatttctgaagccagacggtagatattgatgtcctctttgtattcctcccgtttgctgctgataaatgcggctctctcttcttctggcagctcggcgatttttttagcgtagacagcgtttacagcggcctcagggcccatgacggcgatttgggcggttgggagcgctagacagcaatccggttcaaatgccggccctgccattgcatacaaccccgccccgtacgcttttcggacaatgacagagagctttggaacagttgcctccgacatcgcagaaatcattttcgccccgtgtctgataatcccagcctgttctacttttgtgccaatcataaaaccggggatatcggctaagaacagcaatgggatatgaaaagcgtcacataaggtaataaacttagccgctttgtctgctgaatcgtggaataagacgcctccttttaccttcggctggtttgcaacaatgccgacaggctgtccgtggattcgtgcgaggcccgtcaataattccggtgcaaataaggctttgatctcaaaaaatgagtcttcatctatgacccgctcaatcagctcatgcatatcaaaaggtccgttttgattttgcggaatgacgtcggcaagcggagttttgaagtgttttggcgggcgtttctcatgaatgggcgctttttcttgaaaatttgccggaaagtaagacaaataagcccgcgccagctgtatggcttcttcttcagtttctgcaagaatatctccgcagccggagattgagcaatgcatacgggcgccacccatttcttcaagagacactttttctccaataaccatttccgccatccttggcgagcctaaatacatggaggcgttaccgtctaccataacgacgatatcacagaaggccggaatataagcgccacctgccgcagatggtccgaaaagcagacagatttgcggaatgcgtcccgataatttgacttgattgtaaaaaattcttcctgcaccgcgtctccctggaaagacattgatttggtcggtaattcgggcgcctgccgaatcgactaaataaatgagcggacagtttaatttttcggcggtttcttgaattctgatgattttttcaactgtttttgctccccatgaccccgctttcactgttgaatcattcgccatgacgcaaacggtttggccgccgattttgccgatagcggttacaactccgtcagcgggaagcccgtctgacatacattccgcaaaaaaagcgtcttctagctcaatgtcatcgtcaaagagaagggaaagccgctctctgacaaagagcttgcctttttcccgattgctttgatgatacttttccgctccgccttttcgaatccgttcagcccgttctgttcgttccttttcataatccatcagcattgcctcccttttatattcccttgtatacggcccgtcttttttcttgaaaggcctgaagcccttctctcctgtcttttgtcgggatggtttgttcatacgctttttgttcaatcgcaaggcctgtagcgagatctgtctccaatcctttattgattgcaaatttagcctgacggacagcgatcggtccgttggcagaaatggctgcggccagttcctctgcttttggcataaggtcacaaggagccgtgacatgctctacaaggccgatttcttttgcttcgtgtgcggtcacgcgtctgcctgtataaatgaattcttttgcttttcctctgccaatcagccggggcagcctttgggtccctccagcgcccgggataatagctaaccctgtttccggaagtcccagcacagctgattcagttgcgattcgaaggtcgcatgccaatgccaattctagtccgccgcctaatgcgcttccatttatcgcagctatgaccggctgcggcaaggcatcaagtaaagccgccgttctttgaatgagagatacactttccagaacctgatcttctttcagttttatccgttcctttaggtctgcccctgcacaaaacgctttttcaccggtgcctgtgaggatgacgcaacggatgtttgagttaaattcaatttcctggataatcatttgcaggtttctaagcatttccgctgaaagagcatttgctgcctgaggcctgtttaaggtgatcaacgcaatatgttcatttttaacagtaaaaagaatagaatctcccattgtatgcgtcctcccttttatcaagatgatttaaacacctgtaaatttctgctcggcagcggtttgcccattttttcttcaatccatttggccgcagatagcagtttttcgagctttacatttgttttgatatccatctgttcaagcatgtacacgatatcctcagttgcggcgtttcctgatgaacctggcgcatatgggcatcccccaagcccgcctgccgagccgtcgaacaccgtgatgcccatttggagtgctgtgaccatgttggccagagcggttcctctcgtatcatgaaaatgcagggcaatttgattagccgggaatcgtgccaaaagagcttcaagtacagtttccacttgggcgggattagctgctccaatcgtatctccaagcgacagttcagaaatcccaaattcaaatagagcttctgaaaggcgaatgacttgttcaatggggacatctttttcgtacggacagccgaaaacagtcgagaggtaggctcttgttgtgaggtttgctttttgtgcgtcgttgtttacttgtttgagtatatgaagggattcagaagtggatttattgatgttttttctgttgtgcgtctcgctggcggacataaaaacgcaagcctcgttaatgcctccttcaagtgcattctccagtcctctttgattcgggacaagtgccgcgtacgttacccctttttctcggtcgatgccttttgctacatcgatagcatctcgaagcgccggaatccatttcgggtgaacgaaggatgtgatttcaatatacgacagccctgtccgggaaagctggttgatccaggttattttatcctctgttgcgatccaaacgggctcgttttgtaagccatcacgcgggccgacttctttgattgtcacttttttaggatatggcatggtcttcctccaaattattgagtggaattgctcagttcgagcagtacgtctccttcatttacaaagtcgccttccttttttttgacttcttttacgattccgcttctatctgcaacgatcgggatttccattttcatcgattccaaaatggctacctcctggcccttttcgatttggtcgccggctttgacgtggactttccacaggtttcctgccatttgtatgctaaccgtcatgacaactgcctcctttataggtgttgtttcaaaaagtcagtcgtgacatccccttctttaaatgcctttgttgccgcagcctgtatgagaagcggaagatttgttttgattccttctacatggtagtcgcgaagcgctgtctccagtttttcaattgcttctgttctggactggcctttgacgatcatcttagcgatcatcgggtcataaaaaggggtaacaatgctgtcttttgctaccgcacattcgtgtctgactcctttatggtcagggagtgagaacgcagtgatcgtgcctggtgacgggtagaaggtcttggggtcttccgcgtatattctcacctctatcgcatgcccgtttcgtttgatgtctttttgagagaatgtgagtgtatggcccgcagcaattcgcagctgctgctcaactaagtccaggcctgttatttcttcagtcacggggtgttcaacttgcagtctcgtattcatttcgaggaaataaaaattttgcgtttggtcaactataaattcgatggtgcctgcgttcgtatagccgattgccttcgctgcttttaccgctgtttgcccgatcttcattcttagttcatcgtctacaaatggagacggtgcttcttcaatgactttttggtggcgcctctgaacagagcaatcacgttcaaacagatgtactgtatggccgtgttgatcggccaaaagctgaacctcgatgtgacgcgcatgttcaataactttttctatatacatcgacccgtcaccgaaaaaatctgctgcgcgctttttgtttccctcgtacgctttttttaatgcttcttcattttcaacacgctgcattccgatgccccctccgcccgctgaagctttcagcatgacaggatagccgatttgacctgcggtgcggcaggctgcctctatatctccgagggattcagaaacgcccggcaccacagggacaccagcagcctccattgcttttcgcgcttcaattttgctgcccatctttgcgatgatatcaggggaaggtccgataaacacgatgttttcttgcttgcagcgttcagcgaaccggctgttttctgataacaatccatatccagggtggatcgcgtcggcatttgcttttttcgccgtctttatgattctctctatatttaaataactttcactgactctcgattctccgatcaaataagcctctgtagcggcttttgtatggggcgcgtccttgtctgcttctgaataaaccgcgaccgttttaatgccgagacggctgcatgttcggataattctcattgcaatttctccgcggttggcgatcagtacttttgtaaacatgatttcacctcattgacttgatgataggttgaacatttcaatcgttttttctcgcagtttatatttttgaattttgcctgaggccgtcatcggatagtcatccgtaaaaataacataacgcggaattttgtggcgggcgattttccctttgcaataggctttaagctcatcaggtgaaacgcttttcccgtctttcagtttaatccaggctgcagcttcttccccgaatttggcgtcaggcacaccaacgacctgtacatctaaaacagcgggatgccggtataaaaattcttcaatttcccgcggataaatgttctcgccgcctctgatgagcatatcttttaatcttccagtgatgcggcagtacccgtcttcatccatgacagcaagatctcctgtaaacagccatccgtcatgattgattgcttttctggtcgcttctttgtctttataatagcctttcatgacgtgatagccacgggtgcacagttctccctgcatgcctctttgaacttcttgacatgtcccgggttctacaattttcacctcagtatgtggcagggcacggccggttgtttcgactcttcttatgaaggaatcatttgctctcgtttgtgtaatgactggcgaggcttcggtttgtccataggcgatcgtaatgtctttcatgcccatcctttcaatcacagctttcatcacttcacttggacagggagagccggccatgattcctgttcggagcgtcgatagatcatatgcatcaaaatccggatgatgcagctcggcgataaacatggtaggcacaccatggagcgctgtgcatttctctttttctaccgttttaaggacggtaacgggatcaaattcttgcacgggtatcatggctgccccgacggatacacatgccaaaaccccaaggacgcatccaaagcagtgaaaaaacggaacagggatgcacatgcggtcttgagaggttaaagccatacattcagcgatattagcagcgttattgatgacattgaaatgggtcagcatcacgccttttggaaaccctgtcgttcctgatgtgtattgcatattaatcacattgtctttatccaggctgttcattctctcttcaagctcagcatctgtcactgttttcgccaatatctctgtatcgtcccaatgatacatgccagacaatcgtttattgccaatatagatcagcgtttttaaaaagggatagcgttcagatttcagttggccgggctttgcttcttgcagttctggaattaaactgttcacgatgtctggataagaagtgcccctgtatgaatccatgataataagcgccgcggcatccgattgctttaacaagtaatcaagctcgtgtgcttgataattggtattgacggtcacgagcacggctccgatcttcgcagttgcgaactggacggcaagccattcagagatattagaagcccatatggcgacgtggtctccttttccaatccccatccgcatgagacctttagcggtttgacggcacagactgtcaaattgagcgtacgtatagcggatatttcggtctggatacacaacagcatctcgatcgggatacgcatcagctgtttgttccagcagcctgccgattgtggaatggatgagttcagccattcattgttcctcctttcttaatgataggaaagcgtttacatttttattttaaaagctgtctggcgatcacgagacgctgaatttcagatgtgccttcaccgatttccattaattttgcgtcccgcagcatccgttccaccccatactctttcatatagcctgaacctccatggatttgaatggcttgattgcaagctcttgtcgccatttcagatgcgaatagcttggcgtacgccgcttctttggtgaacgggcggttatgatctttcagccaggcggcttttaacaccatttgccgtgccagatcaatttccatcgccatgtcagcaagcttaaattgaatcgcttgaaatgaagaaatcggctgtccaaactgctttcgttctttcgcatatgccaatgatgcgtcaagggccgcttgagcaatgccgactgcaagagcagcgatggagatgcgaccaccgtccagcgtatatagaaactgtttaaacccttttgttggatcgccgagtaagttggccgcaggcactcttacatcctcaagcaaaatttccgctgtattcgaaccgcggacgcccattttatcgtacgggctcgtaatcgtaagtcctggtgtgtcagttggcacgattaatgcggagatgatgttttttccatctttgtttttgcctgttactgcagtcacaataactgtgcgtgcgtagcttgcattagtgatccagcacttttcgccgttgattacatactcgtcaccatttgaaatcgcttttgtttgagtgcctcctgcatctgagcctgcatttggctccgtcaggccgaatgatccgagtgctgtgcctgaagccagcggcgtcaaatgcgtccgtttttgctcttctgttccgaagtagtatagagggcttgcgcctagcgagaccgctgcagcatagcttaatccagtactgccgcaggctttgccgacttcttcaaccgctaaggcatatgaaatcgtatcaccgccagatccgccgtattcttctggaaatggaatacccatcagaccgagttcacccatttttttaaatgtttgcatcgggaactcgcctgtttgatctacatgttcagcgtgaggagcaatttcttttttcgcaaaatcttttaccatttcacgcaccatttgttgttcttttgtcagctcaaaattcacatcgtttcctccttcacatctttgtaacatcctattaggcgagttctataatcattccctgacaagaaaagtctgaaaattaaaactgaatcattttttatgtgataatatcagcgggatgagcaaatacatgcagtaggcgcataccatccatatcgtaaacgcaataacttggccctttgataaagccgggaagatgaggggaagattccaaagggaaatcgtatccatcaataaaccgaccgctgatccccatatacctagcttgatcaccgcgaactgtgattgatcgagtttttgatagagaaagaacacaaggcataaaacaagagcagtgcccgctcccaagagaagaaagttcggcaaaaaggcttcttcagccggatcagtcaacacagcatctccgaacagcacaaaaaataatgtggcacctaaccagactagaaatgaaaacgtaaaacacgtcctgtacgtgtttctcttcgattttacttagtactagtttctcagattccaataatggaaaatgtccaaacaccgcctccatattcatgtgaatctcacctttgttttttaaaaaaatacagcggtttaccatcgtttcctgtctccaaaatcactaaaaaagacgacttagaaagccgtccttctcatttcttattttgttgttcgtttggaagctttgctttcgttatgaagccggtctgctgaagtgacataatacgtatatttcttgttgggatctgccgtgttatctaagaaggtttgctgctcatgtgtttttctttgcgttgccagcaatgttctctgctttttcccttcggctctgtatatcgcataataggctgtttctttcgttttttgatttgatgggtgatctttaatctgcagaagattgccgtttttgtcttcggtgactttcgtaagcttcggtttttttggggcggtattgtcaagccaaggcatttgcggaaccagtgccggcttgctgtaaaggtcggcgataagcctgtctttgatgccaagcggatttttgttgagatccttgaggctgaaatgcatgcttcctttcaccagttcaagctggcggttcaaagtgatttgccgcacatattcctcagggtcggaccaaggcggatcaaaattgttattgattttatatgctgcctggccaatatataagtgaacaggcctatttttgacttcattgctccaccaatcagccagcacgtcgtacgccgctgcgttaaagccgatactccaataaatttgcggagcaatataatcgatgtcgccttcttggatccaatgtcttgtgtctgcatatagatcgtcataatttctgacgcctgcttttgtattcgatccggtcgggtcatctgctgcgtttctccatactccaaagggactgatgccgaatttgacatacggttttgcagctttaattgtttggttgatttgtttgacaagctggttcacattgtcccgccgccagtcatcgatattagaaaaagcgtcttttccgtattgttcgtactgtgcttgatcaggaaattcctgtcctgctattttataagggtaaaaataatcatccatatgaacagcatcgatatcataatgttttacgacttcttcaatgcctttgacgataaaatctctcgcttctggaatgcctggatgataatacagctggtttccataggcggcaacccaatctggatgttttcttgccgggtgatcctcagacaatttattaagatctgtatgattcattgtaatacggtaaggattaaaccacgcgtgaaattccaaatttcgtttatgggtttcttcaatcataaatgcaagaggatcatagccggggtccttcccttggacaccggttaagtattccgaccaaggcccgtaagctgacggataaaaggcatcagccgtcggtttaatctgaacgataacggcattcattcccattttttgcacatcgtccagcagtttgatatactcctgtttttgctctttcacagataacccttttttggacggccaatcaatatttaatacggaagcaatccatacggctctcagctctctgtcagactgcgcattggccataaacggaacggaaatgacaaacgttccgatgatcaagctgacaaggaaacggataatcgacttttggcaaaccttcattctgtttcttctcccccattacatcactttcactcgctattacggtattcccgggctataaaagggtgattaacagaatgtctatctcactaaataaacgaaaaaagtcctaaagcatgttgtgggccgcttttaggactttttatcattcatcatggtttgcaaactttttaacacgtcaataagttttacgccgacaccgacagccgtttcaaggatcgcttgtgctccggcaatggctaaaataaagatcagcggtattgcaatacgaggcaaaaaaagatagccaagtccgatcaagatggcacaccaaacaccggcacaccagtagcaattgagcatgtatccaaagttagaagccggcacacttttttcatctacatgcccgttttgatcaacaatccttttctttttcataaaaggtttccggataaattctgtgattttgtcgaatacaatcaaatgtgtcagcctgtaactggctagaatcagcatgataaacgtaagaaaagatagatgatccatgacaagcctccaagaaaaaggatgatgttatcattccctagtgtcatcgatccattctttgatacaaaaagaagcggacagagaatgcctctgtccgcgaatccgctctattgtttgtgcgggattgctttatttgaagtgatcttttctaaaatgtcgaggatgatgtcagcattcttttcagcatatgttccttccagcatgtctttatgagcgccaaaacccgtgtactcactatagtttccacaggcgccttcccatttcgttaagcctgtattctcgctggtttctgggtggattccagcttcgatgaaatgaatacttgctttgatgtgcccttcattcagcaattgtgcccaatattcctgatagtttctttttttcttcatcaccttttctctgactgcttcaggcagatatgctgcagattcgtcattaccggtatcgataggcaaaggctgttcttttagataagcgtccacgataatgaagtcgctgacttctaatcctttgcgctccatagcctgtgccacttcaaaagccaggtttccgcctgcagagtagcctaataaaacgtatgggcccttaggctgtatgtccgtcatgcaattaacatattgttcaatgcgggtgtcttgttcaataaagtgaaacccgtatacggctgccttctcattcagcaataaagcaaggtctttaaaataaatgccaaatcccgatatcggcgggaagcagaaaagattttgcgcgccgtgctggttcagtttgatcacatgctgttcatttgctgctgtcagctgtttagaataaagtttttcggcaagctgagcgattgtcggatgttcgaacaagaaatcaatcggtatgtcaatgttctgctgatgttttagtgtatgtatgacttgcagtgcttttagtgaatgtccgccaatagcaaagaagtcatcatcaatactgattgtgttaacaccgaggacttgcttccaaatgttcgccaattcttcttcaaccaagtttcttggcaatatgatgttctgtcgtttggcaggcttattttctggaataggcagcgcgctgcggtctatttttccgtttccggtaagcggcatccgctccacacgcacccagtgctgcgggatcatatagtctggaagcacacgcgccaaatcggcgcgaaaatccgtatctgtttttttgtgatcaccgacgtaatgagtgtacagctgcgcctctccatctttttctctcaatgtcactgctgcttcttgaacgccttccatttctaacaggcgcgcttctatttcggcaggctcaattcgttttccgcggattttcatttgcctgtcaattctgctgatgtattctaagtttccatcaggcagccagcgcgccaaatcaccggtacggtatattctttctccaggcaagaaaggatgaggagaaaacacagcatttgtcaggtcatctttgttcaaatagcctttagcgaccccatcaccgccaacacaaagctcgccgggaacgcctattggcaaaagacgtccttttgtatctaagatgtaagcggtgctattgctgattggttttccaatcggaatcggccccgcatagtctctctttatttcaaaaaaggttgaaaaagtcgtgttttccgtaggcccgtaaatattatgaagcgcgagatctggacaggcgtgtctgacagcattcatcagagcaggagagagtgcttctcctccgacatataacgtatggaggccgcgaaacatgtcagctcgtacctgtgccagctgattaaaaagagctgtcgttaaaaatagcactgtgatgtcattttcaagcaaatacgctccaaaccgatcaggtgtcagcattgtcgatttatcaatgatatgaaggcttgcgccatttaaaagtgccccgaacatttcaaaggtgacggcgtcaaagctgatagatccagtcagaataaaccggtcatcaccggacgcagacgtgtaattgctgtttctgacaagggacacgacattgcgattcgtgatcatgacccctttcggccggcctgttgatcctgaggtatacatgatatatgcaagatcgtctggactggagatggtgttgataggaaaatggttctctcccatcaatgcctgcgcatctgcaatcatacatgttcctgagaacgcagcattttgctccagccccttttgaacaatcagcatttttgcttgcgtttcctcaagcataaagctgactcgttcaggcggaagctcctcatcaagcgggaggtatgctccccctgcttttaatacggcaagcacactgatcatgaattcgggagaatgtgcagccaatattccggctgtctcgtttttccgaaatcccttttgaattaactctctggcgagcgcattagagcgtttatcaagctctttatacgaaatagacatattgccatacacaagtgcggtatggtctggcgtcttttctgcttgttcgcgaaataaatcgataattgtatgtttctttggatactccgtttttgtattgttgaactgtgtgacaatctgctctttttctgttgcatcaagaaaagaaaaatcagcaattggcatatgagggtgctgtgcagctgtgctaagcgcttgcgtaaattgcctcttgatacaactgatccaggcagcatcgtaaacgaatgcattatagctgaacttgatgacaagctcttcgccgggagcaacgacaagattaaagttatatcctgattgctcggatacttgaacttgatcgatttgcagcggtgaatcggtctgatcagcggaatcggcgattttctgctgtaacggatagttttcaaagacgataatgtgatcaatcagttcctgttttaatgcggtgtttgcctgaatatcaaataaaggctggcaggtaaacggctcagcttccagcatttctttctggcatcgtatgaacagttcttgaaacgtttcgtcttgatgtgttttaattcgaatcggtatggtattgataaacaaccctatcatttgctccacgcccgggatttctgacggtcttcctgatacaactgcgccaaacacaacgtcgtctgtgcggttatattgctgcagcatcacaccccagacagcctgaataagggtagcgagcgtgacgccgtgttgtttggcagtctctttcagcttgtctgtcagtggtttatttaatgaaaatatcaaatcttcacggtgataaccttcttttgtttctttatcagacacacgaggcagaggtgatggagtgctgtagttttttaaataggtatcccagtaggccgctgctttttctttgtctcggtttgtcagccaggaaatataggtgctgtacggccggacagggtctaatgaaagcggttttcctgcatgaatcgattgataaatttgcataaattcctgcataacaatacctaggcaccatccgtccattaaaatgtgatggtgactccaaagacagacatgctcatcttcagctgttttgaacagagaaatccgcatcagcatgtctttttgcagatcaaagcctttttgcttgtccttctctttaaagcgttcaatatactcattctggtcgtttgttggcagatgggaaatgtcttcgctgtacaaatggaattcacgttctgtcatcacgacttgccgaggtcccgacaaatgcgggacgtgcggcaaaaacacggttctgaaaatatcatggcggtcgataatggcttgaatgctgcgctgaaaccatttatagctgaggcttcctttaatggtgaagagcgactgctcgacatacgccccctcctctttacggaggaaggaatgaaagagcattccctcctgcatgtgactcagaggataaatgttcttgattttttttatgttatccatagtgtctgcacctttcttcacggtttcattagtgaaaactgagcatatcagcaatctcttgcagggcatcctcggtcagttcttgatcatcataatcgctgatcgttttttctgtttcgcttttgttctggcagtgttcgatcagctgtaataaaaattgacggcatgtttcgctaagctgttcgatggttttgcgctgaaaacgggtagtgtcataagtcatattgacagtcattttcccttctgcagcgattgcactgatatccagcgactgttcacggttccatgttgtgctgatatcacccccggcacccagcggagagaatgagaaggcgtcctcctcaggtacttcagctgtgcggccgctttcaaattgaccaagataattaaagctgatttctggtgcacctgtgaaattgatgtcttttttgccaggcggagtcaaatatttgatgacaccgtagccgaatcctttgtcaggtacacgtctcagtgtatcttttgttgtttttagcacatgaaccatgtattcttccgaatctggcaagtctgcgttcaatttaaccaataacggataaatggcggtaaaccatccaaccgtccggctcacatctattccttctaatacatcctctcgcccgtggccctctaatgatagtttgaaggcggattgattggtccaatggcgcagcgcaagaatgacagaagcgagcagcatgtcctgcgtatcagtgttatatgcgctgttggcgtcttttaagagtgctgctgtctctttctcgtttaaggtaaacgaaatcgtggaccgttgtccctcgtgtgctctagttccatcaatgtgatcaaaaggcaatgcctctgtttgatactcttcggcttcgcgccaatacttgagctgtttcatgagctgctggctttcagcgtagtcagagagctttttcgtatacgctttaaatgagcttgttttaggcggcagtttgataaccttcccgtctgcagcttggcgataccctaaagccaaatcttcaagcagaacccgccatgaaatgccgtcaacgacgaggtgatgagcagataaaaataagaaatcaccgtcaattgtgtggaaaagaccggcttgcagcagcggaccattcttcaaatccattttctgctgaatatcaagtacatgacgtttgataataggctcatacgctctatttccatcagtgcataaatcaatcatctcaaggccgtacaacgcgtcgtccgaatgactgagcggccgattatattgatcccactttccttgttcattctgtgtaaacaccattcgcagcgcatcatgatgacacgttattgcttttaacgttttgcgcagtgcgtcttcttgtacaaaggtacttcgatgcagcattacggactgattaaaatggtgtttttcttttatatcttgagaaagaaaccatttttgaacaggcgaccattgtacgtctccctcaaccgcagcttggctggaacttgtatctgaatcacggatataagctgccaattcttgaatggtcggatggctaaacaaatctttcactgccatttgcttgcctatccggtgaagccgcgcagatacctgtaacgctttgattgaatctccgccaagttcaaagaacgaatcagctgttccgatcttttctgcccccagtacttcttgccatatatctgccagtatttgttccattttgctggctggcgggaggaatggacgttcaccttcgtggttatatacaggttttggaagtgctccgcgatccagcttgccgtttggtgacaatggaagtgagtccagtttttcaataaacgcagggtgcataaacaccggcagcttgttttgtaattctgagcgtacagcatttgtgctcaactctggttttgtcaccacataagcacttaattcggtttgtcctgacgctgtttcatgagcaactactgcggcgtcttttacaccatttatacaccggatgaccgattcaatttctttcgtttctacacggtatcctctgattttgacttgatcatcgattcttccgagatattcgagtgttccgtcggccatccatctggcggcgtctcctgttcggtacattcgtgtttcgggtttaaatggattctgcgtgaatgctctctctgtcagttctggaagattaacgtaccctcttgcaagccctgttcctgctatacaaagctctcccgcaacaccgattggctgaagctgatgattgctatttaaaatcagcacttgagtcccgtcaatcggctggccgatgcttacgtatgcctgcttttccatatgtctcatgacggtagtcgccacgctgttttctgtcggtccatattcgttggcgagttcggtatgcggacatatagctaagctgcggtcgatcaattcgcggtcagccgcttctcccgccagtgtgacgactctaagtgtctttacatcttccggctgcactatgtccaaaagcgctcgatataaaacaggcacaataatcatatgtgtaatccgttgacgagacagctgatgcttaatgaccagaatatccttcgcttcctcttcatgaagcaaaacggcttttgcacctgacaaaagcggtgtaaacatactcgttataaagccgtcaaatgagaaagaaaagagctgcagaatggtatctgtctcgttgaatgcataagcgtttcgccgccactgaagagtgttggcaatacctttatgctcgaccattaccccttttggacggcccgtcgttccagaggtataaatgatataagccaaatgatgagcagacgatacttgcggcagcggtgatttgtcgtatgcctctacactttctatcgctaagaactctccttcaaagtcagcaagtgcttcccgatccgcttcatttattgtcatcagcagtttcgttccgctgtcgctaaggatatagcgtttccgttctgtcgggtattcaggatcgatgggaacgtaacagcctccggctttccacacaccaagtatggatgctatcatactgaacgaacgatgcatcatgatgcctactggtgtgtccggcttaacacctcggctgcgcaatgcacgtgcgattccattggaccactcgtcaagctcctgataagtgagtgttttgtctccgctgacaagtgcagaagcttttggtgttcgtgcagcttgctgctcaaacaattgactgattgtttgaactccgtattgattcgcttgcccggtgttaaactcattaagcagctggtgccgctcttcttgggtcaggatgtcgatatggttgagtgtcacctccgggtttttgccgatgatgctaagtacatttgttaaatgcgatacccagcgttcaatggtggttttctcgaacaatgcggttgaatattcaaaaaggaaatgaatgtttccgtcgccctcagatgcctgtagtgtcaaatcgaatttagaaacgagatgagaaacttgtgccggcttcattttcaaatcatgaagatacaatggctcgtaatcattattttgaacaactaacatcgcatcaaacactgggttccggctcatatctcgtgtcaatccaagcttatcgacaagctcttcgaacgggtaatcttggtgctcaaaggcttccaatgctgtctcacgcacttcctgcaaatactgtacgaatggcttcccgccctccgggcgtgtccgaagcgccagcgtgttcacaaacatgccgagtatcggctcaagatccttgtgcggccggccggcgattggcgagccgacgatgatatcctcctgtccgcttaagcgtgacaagaacgcggtgtaagccgcaaggagcaccatgtacagtgtgcttccgttttctcgtgccagcttgtgaaggcctgatgcaacctcttgatccagcgtaaatgagaccttgtcaccagcgaagcttcgcaccggcgggcgggcatgatcagcggggagatccagcacaggcagctcgccctcgagctgcttcagccagtacgcctcttgcgttttgtacgcgtctcctgttttgaatccttcttgccatacggcataatctttatattgaatgcgcagcgccggaagcttccgattattgtacagctcgccgaattcttgaatcagaatgttgacggaaacaccgtctgaaatgatgtgatgcatatcaaccagcaacaggtgccgctcatctgatacctttacgatttgggcacggaacagcggcgcttggctgagatcaaacggtttgataaatgcggctgcggcctcctgttcggttcgttcgccgagaactgtagtctgtaacgtaaacggcacctcgtcatggatgcgctgcaccggatcgcctccttcgtcctgttcgaaggcggttcgaagcgactcgtggcgcttgatcagctcttggaaagctctgtccatcctttcagggttgagcttcccttcgagctctaacacagccggcatattgtagcctgtccctccgtcttccagctgctgaaggacataaatccgcttttgggcagaggaaaccggataggtttcctgtttttcagcgggcttaatcgcttcatatggactgtccgttccttcacggataacggtagccagtccttctaccgtcggatgggcaaacacatcttttagcggcacctgtacatcgaattctttggtgatccgtgagacaagcgccgttgcttttaaggaatgtcccccgcggtcaaaaaagttgtcgtgaatcccgacagggccatttttcagcacgtcctcccacagctgagaaagcttcatctcagtcacgtttctcggcgctgtgtaggtctccgcatctgccgctccgccaggagctggcagggcgtttcggtcgagctttccgcttggcgtaaccggccactgtttcatttctatcatataggctgggaccatgtagcccggcaacagtctctcaagctgtgcacgcacttcgtttctttggagcccttctatataagcgcataattccggctccccgctgtctgtccgtacggtaacagccgcctctcttacaccttctatatttcttagtgccgcttcaatttctcccggctcaatccggtagccgcggatttttacctgatcatccgtgcgcccgaggaattcaacattcccgtcagggagccagcgcgccacatccccggttttgtacatgcgttcccccgggtaaaacgggtcttcaagaaaacgctcctccgttaatgccggccgattcaaataacctctggcaacacccgctccggcaatgtatagttcaccgatacatccaacaggcagcatccgctgattctgattcaggatatacaatctgacatgatgaacaggttttccaattggaatccgttcaagtttttcttgcggcggacaatcaaagaatgcagcttctacggttgcttccgttggcccataggaattggttattgaaacatttggaagcaacacgtgaaatcgggagacaagatgggtctccagctgttctcccccagaaaacactcgcttgagtctgtttgtcttaatcggtacagagcgatattttatatgttctaaaaatgcatggagcattgaaggcacaaaatgcatagctgtgatcttttgttcttctatggccttcgcgatcacttcaggttctttttcgcctccctgaggaagcagataaacagaagctccggcataaggccagcaaaacagctcccatattgaagcatcgaatgaatatgatgttttgtgcataatcatatctgaatgctttagctgatagcgggactgtagggaattcaaaaaattcaccgctgatcgatgttcaatttcaacacccttaggcatcccggtagaaccggatgtatagatgacataggctaaagattgcgggagaacatccacattcggattggacaaacgatgtgccagtccgctatttgtctgattgagatagacaatctctcctgcaaatgccggaacatgaagaccggaagactgaagcaggagaatgtttgtaccgctgtccttcagcagaaagctgattcgttcttccggataatccgggtcaatgggcagataagcgccgccagctttaagaatgccataaatgccgatcagcatttcaggcgaacgccggcctataatggcaacagtcgtttcagattttactcctcgtccgatcagctcccaggcgatacggttagcctgttcgttcaattctttataggtcatcactccatcttcgaagataacggccgcctgatcaggcgtttttgctgcctgctgttcgagtgcatagtgtagcgtttgattcattgaatagcccgtctcctcaaacagatggcatgattcaatgaaatctctctcttcttcttttgttaagattggaatatcgtccaattctgtttcaggactggcagctgtatgttccacaagcgtggtgaaaaggctggcccacctttggatggtttctttctcaaacaaagctgtactgtattcaaactgacagaaaagctcggaatcatgctctgtaacgtatagggaaatatcaaattttgatattgggtgctccaagtcgttccactgaagctgtatatcattcatttttagcttttgctgttccatattctgaaggactagcgttgtgtcaaacaaaggattccggctcatttcccgctgcacaccgagtttgtccacaagctcttcaaacgggtaatcctgatgctcatacgcttctaatgccgtctgtctgacttctttcagaaattcctcaaatgtcttattacccgctgggcgtgtgcggagagccagtgtattgacgaacatcccaagaacagcttcaaggtcggcatggggccgtccggcgattggtgaaccaatcacgatatcatcctgaccgcttaaccgagacaaaaaggctgaatacaaagcgagaagcgtcatataaagcgtgcttctgtttttatgggcgagccgctttatgcgggccgtgatctctttgtccaattgaaaggttacttttccgcctatgaattgccgttctgccggacgtcgtttatctgttggaagctccagtataggaagatctccgctaaactgctgctgccagtaagtctcctgcttttggtacgagtctccctttttaaatttctgctgccatacggcgtaatctttatattggatccgcaatggcttaagctgccggtttgcataaagatcggtaaattctcggattaggagctgaacggatacgccatctgaaatgatatggtgcatatccaccagcaatacatgcttctcgtttgacacttctataaggcctgctctaaataatggcgcctggctgagatcaaagggacggacaaatccctcgatagtggtctctttacttaacgtaaacggcacttcggtgtggatacgctgaaccggctcgtcatcagctccaggtacaaaggaagttcgaagcggctcatgccgactgatcagttctttacatacagcagacagtttggcgacatccagtgcaccttccagttctaagaccgcaggcatgttataggcgacaccctcatcaagctgttgaagcacatagattcgtttttgggccgaagatacaggatatgtatcccttttttctgctggttcaattgctgcatacagattttgttctgcctctcgaataattaaagctaatccttcaacagtcggatgagcaaagatgtccttaagtgaaacttgcacatggaattcctttgcgatccgtgacataagcactgttgcttttaacgagtgaccgccattgtcaaaaaagttgtcttggatgcctatatgcccattctttagcacatcttcaaatagttgcgaaagctttgcctctaacagatttcgaggggcagtatatgggtttccgctgattgaagcatctggctccggaagtgctgcgcgatctacttttccgtttggggtaagaggtatgctgtcaacccatatccatttcgccggaatcatgtattctgggagctcactagccatataactgcgtaaatctattgcattcagcttttgtacactgcaatagtaagcgcataattcatgttcaccgttttgatcttgccagatgagaatggcagcctcactaatgtccggatgattcattagcgtgacttcgatttcttgcggctcaattcgataacctctgattttcacttgattgtctgcccgtccgatatattcgatgttgccgtcttcaagccgtctggccaaatcacctgtccggtacatgatcacatcaggcttgaatggatcggatgaaaatttgtcgcttgtcagtttatcgtgattgacatatcctctggcaacacttgcgccggaaatatagagttcgcctggtacgccgcatggctgaagctgtttttgatgattcaaaatatatagatcagtacagcctatcggtttaccgattggcggaagctcaggaatagggtctccaggatgaatggtatacgtagataccacatgagtttctgaaggtccgtaatgattgtgcaggtgtatgccgcgttcacacaacacatcttggaaaaggtctgaaatcattaattgttccccggctgcgatcaggtgtttgacgccatcaggaaacgagttcgcaagttctcgctcgctgaaaatcattttgataaaagcagttgggagaaacacaatattcgtctgatgcttgtttataaatgcaaacagctgaggcacatctctttttatggcttctggcacgatgtggagtgtgccgcctttcagaagcgcagaaaatatttcttgatagcagacgtcgaaggaaggtgtcgcaaattgcagaacatctgcttcaaagtcaatgccggagtgagtatattcgaacttcagcaagttagccatgtttcgatgctcaaattgaacaccctttggtttacctgttgtgcctgatgtataaatcatatacagcagatcgtcagcattgttgactgactttatgttactgccgtctactttgctttcgatatcttctggatgagtgataatgtaattgtcttctaacgatgaggaaagatgcgcttgtgaaacaacatgcgaacagccgcaatcatgcagaatataacggattctgtcagccgggtaatgcggatcaaccggaacaatggcgccgcctgctttcaagataccaagaacacctgtgataaacgccgctgagcgttccatcataatcgcaacgggttcctgtctcacaacgcctttcattcgtaaatgccgtgccaatctgttagccgctttattcagttctctgtatgttaatgagcaggcttgatcaattacagcatgagcatctggtgtcttttccgcttgcttttcaaacatggcatggatggtttcgtaaactggtgttcgatctgtgatttctccaatcagctgccgcttttcagtatctgtcgtgatatcgatttcttcaggtggaagattcggattatttaagatttgtgatacagcattcagaagatgctctttgacagagagcacaaaagaccgatcgtgctgctccgcatcatagttcattttgatatgaatttcttcccctggcgccaccataagataaaagctgtagttggtttcatctgcgacagtgaaattatgaatctgaaaaagatcagaagcatgttcctgtttgttcagcatttgaatctcttgctgcaccggatagttttcaaatacgagaatatgatcaatcagcccttgtttaacagctgagcgggattgaatctcatataaagggtggtagctgtacgcttcagcggcaagacggtctttttgcatatcttttataagttgaagaaatggcgtttttgccccctgcacccgaaccggcatcgtattaatgaaaagacctaccatatgttcaatgccttcgatttctgcgggtcttcctgaaatgacagaaccgaatacggcgtcatcgttattattatatttttgtagcagaatgccccaaatggtatgaaaaatcgtactgagtgtcacttcttctcttgcagcaagctctgaaagtctgctgctttcttccttagagaatgaaaatgtaacgtgttcctgcctgctttttccctttgtttttttctgcttcgggagcacggtttgctgttcgtggccggaaagataatggtcccaataagaaaccgcctgctctttgtcttgctccatcagccatttgatatactttccgtatggctggaccggctccaatgttataggggatgcatttacataagatgcgtaaatatgcagaaactcctttagcacaatgctgaggcaccaaccgtccatcatgatatgatgaaaggtccaaatgcaagagtactggctctctcctgtttgaataagagcgatgcgcatgagcacatccttttgcaaatgaaacccccggtcccggtccttttctttccattgctcgataaactgtgattgctccgcctcgtttaaatgagtaatgtcttcttccagcacgatgacatttcgttctctcagaacaacctgctggggggaggaaacattttggctgataaaaatcgttctgaaaatatcatgtctttctacaagagcgttgatgctgttttgaaaaaactgcgggttgacttttccttctattgtaaaagaagcttgctcaacatacgcctgtgaatctttttgcaggagggaatggaaaagcatcccttcctgcatgtaagacagcggataaatatcctgaattgaattcgcttttgtcatgttcatgtctccctgtcacgattttctacaattcttccaccaagctggatatgctgtccaagtcctctgccgttaatgattgactgctgaaatcgctcagtgtcttttctgctttctgttgaccggcgcagtgtttcataatgtccagcaaaaagtgttcaatcctgttaataagctgctccattgtgtttctgtgaaagcgggctggcggataactaagattgaaatggagctttttgtctgctgccattgcactcatctcgatgatttgctcacgcttccatgtatgagtgatatcctttccgctaccaaggcttgatgggcggaaggtgtcctgtctttcgatgtcgttgaactggcccaaatagttaaagctgatttcaggtgtttttgaaaacgtaatgcttttattttcagggtgtgtaaggtatttcagcataccgtaacctacccctttgtttggtatccggcccagtgtatctttaacggtttttactgaggttccgagctcatccctatgattttcaaagcttatgagggccgggtacatggatgtaaaccagcctaccgtcctgctgatatctaactctggcagaatgtgttctctcccgtgtccttccatagcgatacggagcttgcttcctcctgtccattcacaaatcgccaaggatgctgcggttaacagaatatcttgtgtatctgtgccataggcgtgattgacgttttgcagcaagacggcggtgtctgcttcagtcagtgaaaagcttaatgagtcccttttgctggtgtccatgttcagatgctgcggtatttcgtatggcagttctgcggcttgctgttcttctatacttcgccaatacgcctcttcgcgaatcagcttactgctttgggcatattcctgtatgcgtcttgcgtattcctggtaggaatccgttttaggcggaagctggatcgtctggcctgcagcagcttgttgatatccggctgacaaatcctcaagcaaaatccgccatgagacaccatcaacgacaaggtgatggatcgcaaggaacaagtaatctccgatcagtgttttaaacaaagcggcgtgcaacaatggtccttcctgcaaattgatgctttgctgaagatctgcaacttcttgtttgatttgcgtctcccagccgctttctgactgtgaaagatcagaggttcttaagctgtatagctgtgactcatgaatgccttggttgatttgaatccatcgcctatcatcgttgcgataaaccatccgaagcgcatcatgatgctccgccagttttttcaaggctggtctaagggcgttttcagacaaacgtccagaatggaatagcatgacagactgattgaaatggtgtctttcttcaatatcttgtgaaaaaaaccattgctgaacaggcgtccaaggaacgtctccctgaatgggtccttgctctatgattctctctgacttacggataaatggtgataagtcctttatctttggatgacggaataaatcacttacctgcaagcttagcccatagcgcccaaggcgtgcagaaacttgaagcgctttgattgaatctccgcccaattcaaaaaacgaatcctctattccgatcctctggatgccgagaacctcctgccagatcaacacaagttggtcttcaaggtcatttcgaggcggagcgtacgtttgtttagatgtgaaatttggttcaggaagtgcttttcggttcaatttgccgtttgatgtgagcggaagagtctccatttcaataatgtacgccgggatcatatagtttggcagcgaacgcgcgagaagtgaacgcacttgttcagcattcgtgcctgcttttacgctgatatagccaaacagctctttgctcccggtctgggctgtacgtgctaacactgcggcttctttgaccccgtctatttgacgaagtgctgattcgatctcacccagctccacacgatagcctctgacttttacttgatcatcaatacggccaacgtactcaattgtgccgtcaggaagccagcgcgccagatcacctgtgcgatacagtcgatcgccaggtgcaaatggatgtgggacaaatttctctttcgttaaatcaggacggcccaaatatcctctggcgacgccatctccgccgacacaaagttcaccgacagctccgaccggctgcagcactccccattgatttaagatataagcggtggaattaccaaccggccgcccgatcggaatggaaagttcatatgttttttgaatgtgaaggcatgtcgaaaaagttgtattttcggtagggccatatccattccatatagatacttcagggcagacatttctgattcgattgacgtggctcggcgacaaagcttctccgccaataatcaaatgtttcagctgtgaaaatgtttgttcattttgttctgtcaaatgattgaatagagaagatgtcagccaaatcgttgtgattccttgatgttctatgtacctcttaagctgatgggaatcgagaaatgtttgttgatcggacagatgcaaagcggcaccatttagcagcggtccgaaaatttcaaatgacccaacgtcgaaacctattgatgatgtcatcagaaggcggtcttcaggtgtaaatgtaatataattgctgtttttaacaagacgaattacacttcgctgctcaatcatgacaccctttggtttaccggttgatccagaggtataaatgatatatgcgagtgaatgtggccctgctgaagaatcaacgttcttcgtttttccttgcttttgaatatcttcgattatgatttgttcacattcaatgtctaatagctgtttttctgttttttcagattgaaggagtaatgccgccccgctgtctgacagcatataagctattcgttcaacaggcagatcagaagcaataggcagataggctcccccggctttcagaatgcctagcattcctgcaatgagttctggtgttctgcctgtcaacaaggctacaacactatcaggccctacgcccttaatctgtagaactgaggcaatttgatttgcccagctgttcaggtcctcgtaagtaaatacttgggtgtcgctgacaattgctacagcattaggcgtttgttcagcctgcatttcaaagagtctgctgatggtttcatttcttggataatctatttttgtgcgattgagctcgtggataaggtaatgggtctcatcctcattcaggatatttattgttccgagagcggctttgttgtctttgaagatggagagtaacatattgatgaagtattgaagccacttttctatcgtttttttcttatataagtcagtactaaactccatttggaacgtcagcaaaccgtggggctgttcctgggcatatagggttaaatcaaatttggacgtttgatgcccattgtttgctgcaggtttgagacaaagttcatccagctccaacgattcctgatccatgttttgaagaacaaacattacgtcaaacagcggatttctgctcatatcccgtgtcaattcaagcttatcaacaagctcttcgaacgggtaatcttggtgctcaaaggcttccaatgctgtctcacgcacttcctgcaaatactgtacgaatggcttcccgccctccgggcgtgtccgaagcgccagcgtgttcacaaacattccgagtatcggctcaagatccttgtgcggccggccggcaattggcgagccgacgatgatatcttcctgtccgcttaagcgtgacaagaacgcggtgtaagccgcaaggagcaccatgtacagtgtgcttccgttttctcgtgccagcttgtgaaggcctgatgcaacctcttgatccagcgtaaatgagaccttgtcacccgcgaagcttcgcaccggcgggcgggcatgatcagccggaagatccagcacaggcagctcgccctcgagctgcttcagccagtacgcctcttgcgttttgtacgcgtctcctgttttgaatccttcttgccatacggcataatctttatattgaatgcgcagtgccggaagattccgattattgtacagctcgccgaattcccgaatcagaatgttgacggaaacaccgtctgaaatgatgtgatgcatatcaaccagcaacaggtgccgctcatctgatatctttacgatttgggcacggaacagcggcgcttggctgagatcaaacggtttgataaatgcggctgcggcctcctgttcggttcgttcgccgagaactgtagtctgtaacgtaaacggcacctcgtcatggatgcgctgcaccggatcgcctcctgcgtcctgttcgaaggaggtacgaagcgactcgtggcgcttgatcagctctttgaaagctctgtccatcctttcaggggtgagcttcccttcgagctctaacacagccggcatattgtagcctgtccctctgtcctccagctgctgaaggacataaatccgcttttgggcagaggaaaccggataggtttcctgtttttcagcgggcttaatcgcttcatatggactgtccgttccttcacggataacggtagccagtccttctactgtcggatgggcaaacacatcttttagcggcacctgtacatcgaattctttggcgatccgtgagacaagcgccgttgcttttaaggaatggcccccgcggtcaaaaaagttgtcgtgaatcccgacagggccatttttcagcacgtcctcccacagctgagaaagcttcatctcagtcacgtttctcggcgctgtgtaggtctccgcatctgccgctccgtcaggagctggcagggcgtttcggtcgagctttccgcttggcgtaacaggccactgttccatttctatcatataggctgggaccatgtagcccggcaacaggctctcaagctgcgctcggacttcgtttctttggagcccttctacataagcgcataattccggctcgccgctgtctgtccgtacggtaacggccgcctcccttacgccttctatgcttcttagtgccgcttcaatctctcccggctcaatccggtagccgcggattttcacctgatcatccgtgcgcccgaggaattcaacattcccgtcagggagccagcgcgccacgtctcctgttttgtacatgcgttcccccgggtaaaacgggtcctcaagaaaacgctcctccgttaatgccggccgattcaaataacctctggcaacacccgctccggcaatgtatagttcgccggcgacaccggaaggctgtacggctaaatgcggatctaaaacatacaaacgcgcaccaggtacgggcttcccaatcggaatccgcaaacggtctctgtcccgttctggatccaatacgtaaaatgccgcgtctaccgttgcttctgtcggcccgtagccatggattaatgatacctgcggcaatacagaagcaaaacgggctgccgtacgcggcgcaagcggttcacctccggcgaatacacgctttaggtttgtcccgtcaccaagcgctaacatttctgcttgatccagaaagctattcagcatagccggaataaaatgagccgttgtcactttttcctgatgaatggcttttacgatcaatgcggagtctttttcccagccgggcggaagcagatacgccgaagcaccggaaagagcccaccaaaacagctgccacacagacgcatcaaaggaaaaagaggttttcaccatgacaatgtcatcttctgaaagcggaaactggtgctgcatgccggtcagaaaggaaacagcctggcggtgctcaacggccactcctttcggctgcccggtagaccccgatgtatagatgacataggcgagagaaccgccgtcagcaggagtaaacagatggttttctgctttttcgctcgcaagagatgtcatatccacttcaagcgtttcgccagaaaagttcggtgcggagcatcccggctgtgtcagcaagagcgatgccccgctgtctttcagcatgtagctcagccgctcctccggatacgcaggatcaagcggcaaatacgccccgccggccttcagtacagcaaggacagcgatcagcatgtcaggtgagcgttcagacaggatcccgacgatactttcgtttgtgacgccgcgtgccgcaaggtgagcagccagccggctggcgtacatatcaagctcagcgtatgtcagcgaaccgcctgaaaagcgaatcgctggccgctccggtgtgactgccgcctgtcgttcaaacagcccatgcaaggttggggcttcaggtgaaacagatactgtcctgttattttgagaaacgattttccgtgttttgtcctcatctagcaatgtcatctttgacacaggaagagatggatcagagatgacgtcagagatcatgtgctgtaaataatcttttatttcggacatcatatttggttgataagtgcctgtatgaaaatgaatccgaacgtacaaagtacgccctgggatcactttgacactgcatctataattagttacctcttccatctcaaaatctttcacggagaaatcaaatgatccagcttgattcagctcttcaatctcttgttgagtaggtgtattttcaaagacgataatatgatcaatcagctcttgtttaagagcgctctgcgcctgaatgtcatataaagggaagtaactatacgcttctgcttcagtcatgtccttttgcattccgctgactaggtcagaaaaagacagaaaatcactttggactcgaataggaatggtattgataaaaagtccgaccatgttttccacatcttttagctcagaaggtctgcctgatataactgatccgaatacagcatcgtcgcgacgattgaacttttggagcatgattccccataaagcttggaaaacagtgttaagtgtcgcaccacatgctgcagcgattttctgtaattcggaggtttctttttcaggaatggtaaacgtgatctgctgtaatgtcccatccgacatttgatctgttcttttaggcagaggtgaagctttttcgaaatgctgaagcctctttttccaatactcagctgcttcttcccggtcttgctgcatcagccatttaatatacgtcccgtacggctgtacgggaggcaaatcaggaaactgcccttttccaagcgcttgataaatatggagaaagtctttaatgacgatgcctaaacaccagccatccattaaaatatgatggtggctccagatacagacataatgatcaggcgcccattttaaaatagatattctcatcagtacatccgtttggagatcaaagccttttgatttatcctgttctttgaatgcctctgtacaatgttctttatctttttcattgagatgagaaatatcttcaacatgaatatggcaatgacgttgcttgagcacgacttgacgaggtttggctacatttttatagatgaatgctgttcgaaagatatcgtacctgtcaaaaacagcatccatacttttctggaaacgctccaagtcgagctgtccattgatcgtaaaagaagcctgttcaaaataagctctcgactgttcatcatacaatgagtgaaaaagcatcccttcctgcataaatgacaaagggtatatatcctgtatttcaggttgctgcggcatcagtgaatctcctctcctatagtttgttgacggctcccatgatctcactcaattcatcaagcgttaagtcttcatcagtgaaatcagatgcgctccactctcggttttctttgccggtacaatgctcaatgatgttttccagagtctgtttaaaatgcctggaaaatgtttggattgttttttcctcaaattgaaccctgttatagatgatgtgcatgttcaggcaccccgaagaaacggcgccgctgatatccagtgcataaggacgctcccagttcgggctgatctcatttcctggcttgatgtcagacacctcaaaggcatttgattgaatatcctgatcaaactggcctaaataattaaagctgatttctgggctgtttttctgagagccccatcttttgctgatatatttcagcacgccgtagcccgcgcctttatgcggtatacggtgcagcatatcttttgtctgtttaataaggtggcccagccgctcttctttgtccttatgatcggaatctctcatatcaagccacacaggataaatggaggtgaaccagccaacagttctgctaatatcgatgtcctcaagatatgattcccttccatggccctccatgctgattttaaattggttatttcccgtccatttctgcaaagcaaaacctaaagctgtcagaaggatatcattcatctccgtgctgtaagctttatgtgcagccgttaatagtaattctgtgtgatggcgagatagctcaaaatcaatcacttctgtatctatgaatgtgttagatgctgcgtcattgtcttttggaataggctggatgtgacggttctcgcactcatcccagtacgctgcttctcgctgcacctggcggcttttagagtagtcagctattctttgtgaatacgttaaatatgaatctgtttttttcggcaatttaatagattctcctgagactgcctgtttgtaagcagctgaaaaatcctcgaacaaaatgcgccaggaaaccgcatcaacaactaagtgatgaatcgtcagaaataaatggtcaccattctcggttctaaacaatccagcatgaagcaaggggccggtttccaaacgaatatgttcttgcatccggctggctgcttcctcaatcgtgtaccgtgcttctgttaggctatcctttacatcaaacagttcaagtgcatatagctcctcatctgaaagatctatccctctgtttatctgcacctgcctgccatcttcatgccggcatacgattctcagtgcatcatgatgagtcacaaggctttttagtacttttctaagcgcagcctcatcaaatcgttcagcccggtagatcataacggactggttaaaatgatggctttccagagattgcgagaaaaaccactgctggataggtgtccaagtaatctcgccttcgaccgggccttggtcaatggcgcgtacgtcttttcgaacccgggcggacagttcaccaagagtctgatgttcaaacatctcacgtactgtcgtttcaaatccgcgctgcttcagtctggcacaaacctgcagcgctttaatagagtctccgccaagctcaaagaaattggcgcttacacccagctcatctacattaagaagctcctcccaaatttcagccatgaccgtttcaatctcatttctaggactgatatcatcagatgtataagcgtgtttttcaggctcaggcagggctttctgatcgagctttccattaacagtcaccgggatgctgtcaatttgtatcatacgggcaggcagcataaagtcaggcaaggcgttttttaggtaagcccggatgtctgatatattcgcagcctgttgatcttttatcaccatgtaagcatatatagctgtttgcccttgctcgtctgctctggtaatgacagccgcctctttaatcattggatactgaagaagtgccgcttggatttcgcctaactcaatacggtgccctctgactttcacctgctcatcaatgcggcctaagtattccagctcgccatttgacaggcgcttagcaagatctcctgttcggtataatctgtctcccggaagataaggattggatacaaaacggtcagcggtcagctcatctctgttgagatatccccgtgccacaccttcgccgcctatatacagctcccctggaactccgatcggctgaagattcatatgagcatccatcacataagcctgcagagttgaaagcggccgtccgatattgcttttattttttacaatgtctgctgcggacaattttttgaatgttacatggaccgttgtttctgtaataccgtacatattaatcaaatcagtatgaggatattttttattccagctttgaagcatgccgggctgtaaggcttcgccgccaaaaatcacgtagcggatgtttaaatgatctgtatgattttgatcttcaagcatcaagctgtaaaaagcagtcggggtctgattgagtacagtgacgcgctctttttttaacaataaacggaatgcatgggggtcacgggctgtttctttagagaccacgactaatgtacctccgttcaataacgcaccgaacatctcccatacagagaaatcaaagcaataagaatgaaataacgtccagatgtcttcatggttaaattcaaaaggcaggttttgatgcttcaagagactgatcacattgcggtgctcgacaatgactccctttggctggccagtcgttccagatgtgtatatcacgtatgcgggctgatctgttactatttcttgaatgtttgcatcagccggaattgagttgttttcacattcatcgatatacaaaatatgcccggtgtagtctgcaggtttgttttgaccgcgctctgtcagcagcagttttgctccgctgtcattaagcataaagctaatacgctccttgggatattcaggatcaatcggcaaataggccccgccagcttttaaaatcgataaaacgccaatgatcatatcaggtgaccgatcgagcatcagaccgacgatatcgccagttcttaccccttgtttgatcagcatagcagctgcccgctcggctttttcattcaggtctcgatacgtaagctgagaatggccgcacaccactgcgatatgctccggatatttagcggcttgcttttcaaataagcttactatgttttcatttctcggataagccgcatactgtcccattttttcaaggagcaacctacgctctgcagcaggaagcaattgcatgtccgaaattctcatctcggtatccgccgttacccctttcaccaattcaataaaataggatgcccactgcgtaatggtttcttcttcaaaaagagcagtgctgtattcaaaacggcagcgtatcccactaggatgctcctcagcgtgtaatgttaaatcgaatttagatatatcatgtttaggagtgacagacgaaatcgacagaccaggcacttcgaaccggaaatcttcactgctttgaagcacaagcatcgcatcgaacagcgggttgcgatttacctctcgatttgtatcgagcttatctgccagctcctcaaaaggataatcctgatgctcgtaagcggtcagagccaggtggcgaatgtcctgcaaataggagctgaacgttttgtggccctcgggcttgctgcgcatcgccaatgtattgacgaacatcccaatgacgcgctccagatcagcgtgcggtcttccggcagcaggcgaaccgacaacaatatcctcttgtccgcttagcttagataacaaaatagaatagacagccagaagaatcatatataatgttgttcccgtttcagccattaaacggtgcagctcatcagccatgtctttatcaatgttgacttcaattgttccaccgctgaaatcagggagacgcggccttgttttatcaagcggtaattctagtgtaggaagactcccgccaagctgaccgagccagtaggcctcctgttttttgtatagctcttttgggtgcttctcttgctgccaaacagcaaaatccttataatgcaggtttaaagctggcaactcttttccgcgatataagtcagtaaattcttggacaagagtgctcatcgagacaccgtcggcaataatatggtgcatatcgagcagcaaaaagccgcggtgattgccgattgtaatgacacatgctctaaaaagcggaccggatgatagatcaaacggtttgataaaggtctcgattgcagactcaagcatttgttctgattccatttcaagctcttttagatcaaaagctatctctggataaatgatctgcacaggctcgtctctgtcaagcacaaaaacagtccgtaatgcttcatgccgattcacaagttctgtgagaacgcttctcaaccgctggcggttcagatttccgcgtaattcaagtacagctggcatgttataacctgtgctggcatctgccagctgatgaagagcatataatcgtttttgcgagaaagacagcggatagacatctctttgatccgcaggttcaatctgtgtaaaagcgtgttcttttaagctcatcaatttgaccgccatgctttcaaccgtcggatatgaaaacacctcactgagcggcagctcgacattaagctttttatgtattcttgataccagtgcggccgcttttaaggactgtccgcctaactgaaagaaatcatcacgaatgccgatgtgctgtttattcagcacatcttcccaaatatgtgcgagatcagcttcgattaaggttcggggcgccatatatgtgacactcgtattgttttctggttcaggaagcgcaaacctgtcaagcttgccgctggatgttaatggcatccggctgatgttgataatacttgctgggatcatataggacggcaatgtcccggcaagatgctgatacaaatctgggaggctgtttcccttttccggaacgatataagcaacgagctccttttcctcagcagaaacatcacgggccagtaccgctgcttcttttacccccggtgcttgtcgaagaactgtttcaatctctctcagttcaatacgataacccctaattttcacttgatcatcaaaacgtccaatatattcaatcgttccatcaggcaaaaagcggcctgcatcacctgttcggtataaacgctccccttcaaggaatggatgatcggagaatgctttctgtgtcagctcttgctgtttgtagtatcctctcgcaagacccgcgccggaaatacacagttcacccgccgcgccgatcggctgcatttgatttccgtgcaaaacaaatacttttgtgtttctgatcgggtgtccgattgtgatcctctctttttcattcagatgccgcaatattgttgttgccacactgttttctgtgggcccgtattcatttgccagttctgcagaaggacaaatcatttgactcaactcaagcagatcaggcgtgaccgcttcacccgcaaatgtcacaatacgaagactttttgcatcgtcagcagtcatcacttccaataacaccctgtacagggaaggaacaatgatcatgtggctgaccttataacgggctatttttcgcttaagggccagcacatccttcgcttcgtcatctgttgtcagcagtacgcacgcaccggataaaagcggggtaaataagctcgttacacagccgtcaaacacgtacgaaaacaaatggagggatatatcctgttcggtcatgtcatactcttcccgtctccattgcaatgtattggcaataccgtgatgatctactaaaacccctttagggcgccccgtcgttcccgacgtatagatcaagtaggctagatcacctggcggcatatttggagcttctgtttggtaactttctgtatgttctatcgttatcgtatttccttcataggacggagggatcaaggaaataaggtcttcttctatcagcaattgagccgcttgactgtccttcagcaggaaagaaagacgttctgctggaaaatgtggatcaagcggcatataagcgccgcctgctttccaaatcccaagcagagctgcaggcatttccattgaccggcccatcatcacagccacgatatctccagatctaacgcctttttctatcagggcgtgcgcaatctgattggctcttatatttaattggcgataggtccagcaatcgtctcccatttttaatgcagccgcttcaggtgttttgcgggcttgttcctcgaacaattggggtatcgttttgttcacataaggacgctcagtttcgttaaacgattggataacctgttgctcctccggcggcacgatattgatgtcactgacggcaacatcgggatttgtcaaaatgcaatccagtgcttgctttagatgcccctgaatcctcagcatctcctcccgctcgtaaacgtctgcgttgtagctgaatttgatataaaatgattctcccggaacgataacgatattaaagtcgtaattggtttgttccgacattgaaatgtcactcagcttcagagcgccttcgtcattttcactctccacgcttaatgcctgatgaagctgtacagggtaattttcaaaaacaaaaatatgatcgatcaacccttgcttcaatggactatggttttgaatttcataaagcggataatacccatgctgttcagatgataaaatatcctcctgcacggctttgaccagcgaagaaaacgttatgccttccgcagatcggattcgcactggaacagtattgataaacaagccgaccattgattcaatcccgtcaatcgctgacgggcgtcccgaaatgacggagccaaaaacggcatcggcatcatctgcagcattatatcgatggagcagcacgccccaaatactcataaacaacgtgtttaatgtcactccccagttttgggcagcctctgtcagtttctcaaccatttcctgcgctaatgaaaagctgacctggtcggctttataattcccgtctgccgtgcggcgctttattcggggaatagaagcagtattgccgtactccttcaaatattcgctccagtaggcagcggtctcttcttgatcttgttctccgagccattcaatataacggctgtacggcaccgtgctgccaagctgtacaggtgagttatttttgagcgaatcatacatgctgaaaaactctttaagaataatgccgagacaccacccatccatgatgatatggtgatgtgtccagacacatgtatattggctgtctcctctatcaaaaagggcaagacgcattaaaggatctttttgcaaatcaaatcctttttcccgatccttagtcataaaagcatcaatcagcgtctgctgttcttgatcagccaggcgagaaatatcttctctatatactgtcaattcccggtttgataagactacctgctgcggacctgtaagatctggtacttctttaatgaaaatcgttctgaaaatatcatatctagaaacaagaaggtttaagctcttttgaaacgagtcgacgcatagattccctgtgatcgtaaacgaggtctgttcgatatatgctttcgagctgaaatccattaatgaatgaaacagcattccttcctgcatgtgcgataacggataaatatcttgaatttgtgccgattgtgccatcaattccacacaccttttcaaaagttaaagatctttcacgagatcttcgatgctagataatgcagacaacgttaattccttattgctgaaatcgctcaatgttttttcgcgtgcttttttctgcgaacaatgctcaatcgtctcgataagatgcctgtgaaaacgatccataaaacactcaattgagtgtttgctgaacacctgggtgtataccgcttttacttgaagccgtccgtccgtaatgagagcgttaatgtccagctcatactctcgttctctctcacccgctatttcgtaacggggctggtaatatgataattgaaacgtatcagcttctttctcttcgctaaattgaccgagataattaaagctgacctcaggctctttatgccgcagttctcctatgtgtgttaacaatccgtatccagttcctttgttcggtactcttctcagcatatcttttgtcatcttaattcggtatgcgagctgatcctcgaaaggctcgggaatacccatgtctagcagaataggataaatggaagtaaaccatccaactgtccttgaaatatcaatgtttggcacatgcccttctctaccgtgtccctcagtgctgatcacgatttggtcatgcccagtccattcagaaagcgccaatcctaaagccgtaagcaaaagttcgttggcatcagtaccataggcttgctgggtttcaaacagcaatttttcagtccagtctccggatagtacaaacgcggctgcgtcgctattcatttggagtctgtccggcacattttctatgtccttaggaagaaaagcagtgtgagcgtctaaaatcgtttgccaatacgttttctctgaaagcaattgtttactttcagctatttgggtaagaccatcggcgtaggataaataagaatccgtttttggcggtaattggatttctttcttttctaaagcctgttgatatgctgcagctaaatcttcaagcagaattctccaagaaacgccatctatcacaagatgatgaagtgcaatcagcaaatgatccccttctgccgttttaaacaaacctgcttgcagcaaaggccctttttctacattcattttgctttgaatgacggtttcctcagcggcaagtttttcatcaagatgagccctttccagcgatgcttttgtccaatctgaaatataaaggccaaacagttcatgatccttgtgattgattccgcgattaaactgaatgacatggccgttttggtcacgttggaaaatcatgcgaatggcatcatgatgctcgattattttacgcagcgctagatgaagcgcgttagcattgaatcctttttcactgaaaagcatgacggactggttgtaatgatagtgaaaagcatgtacctgtccgaaaaatcttcgctgaatcggggtgagttcagcttcaccttccgcaggtccctggtccgcttgagatgccaatggtgtgatatgtccgcatagttcctgaatcgttgaataacggaataagtcgcgtattgtcatgctccagccttcagctgccagacgtgctgccacttgtaatgctttaattgagtctccgccaagctcaaaaaaggaatcgtgaatgccgactcgtgacatgctcagtacatcttcccatatatacgccatcgttttttgtatgtcgttaactggtgcggtatatggacgcgataacacattatttggagccggcaaggcatttctgtccagctttccgtttagggtcagcggcatgttttctaaaggaatcagatgtgcaggaatcatatacgctggcagctcctttgttaaagcagcacggagagcattcgtattgacgtctgaaggcacaatatatgctgccaaaccagcctgtccatttttatcatgctgaacggcaacagcagcttctctgacaagccccgtttgaagcagaacactttcaatttcttctgtttcaattctgtatccatttatctttacttgataatccattcggccaagaagcctgatcgttccgtttggaagccagcatgctcgatcaccggttctgtacagcctttctccagagacaaatggattttctgtaaatttcatttgcgttaagtcaggtttatgatgatagcctttcgcaacacctgccccgccgatgcacagctcgccggcaacaccgatcggctgaatttgatcagtctggctgagtacgtacatgtgtacattcggcagcgggctgccgattggtacgttatctcccgtacactctccacccatactggtttcatagaaactcgaatcaatggttgcctctgtgacaccatagctattaatgatgcgcatgctttggccaaagcgatctgtcaatgttttgaaatcttgagctttcaccatgtcggaaccaaggatcagcatgtctaagtcaggaagcttgaactggttacggtatacatactccatcaccgggataatgagagccggtgtcgactccatcaccgtgattctctgagagttcatgattttatatatttcagcaggttccagccgtgtttcatctgggcaaacgattagagtcccgccgttggtcaatgttctcgccaaatctcctgagaagacatcgaatgaaaagctcgcgatttgaagcagtctgacaggcttccgatccagttcataaatttgacgccaagcaagagcagcatgagtaaagttctgataggtgacaataacacctttaggcgcacccgtcgttcctgacgtataaatgatatataccggctcttcaggagcaggagataagttaaggttgcagttactttcttcataagtgctttcatcgtcaaggcagatatgagacatctcagattcaggcaagtttgaaatcaaatgcttcaattcctgctgtgaaagtagaatatctgccccgctatcacgaagaatatattcaatacgggcttttggataatgtgaatcgattgggatatacactccgccagctttcatcactgccagcactccaacaattgcatcaatggaccgcttggctaaaacagccacagttggcttcggtccttttctgttttgcaatgttcgtgccagacgattggctctttcatttagaagccgatagctaatctctgtttcgttatcaataacagctatatgttctggaatttcttcagctttcgcttcaaatatgcgatgaaaaggaacatctttttgagcaaattcaacctgagttttgttaaattcaaagactattttttgtttttctttatcactaagtatgtttatttgtgcaaggcttgtttcaggggttgaaagtgccgcatgcagaaattggataaaatgatcagcccaccgttcaatcgtagcttttaggaatacttctgtactaaattccatttcgcagcaaatagatccacttacttccgtagctattaatgtgatatcaaataaagaaatgtaatgtgcgaaattggcaggccggacttttatttctctcagatctatgtcctgtttttccacattttgaaggataaacatcgcatcaaacactgggttccggctcatatctcgtgtcaattcaagcttatcaacaagctgttcgaacgggtaatcctgatgctcaaaggcttccaatgctgtctcacgcacttcctgcaaatactgtacgaatggcttcccgccctccgggcgcgtccgaagcgccagcgtgttcacaaacatgccgagtatcgtctcaagatccttgtgcggccggccggcgattggcgagccgacgatgatatcttcctgtccgcttaagcgtgacaagaacgcggtgtaagccgcaaggagcaccatgtacagggtgcttccgttttctcgtgccagcttgtgaaggcctgatgcaacctcttgatccagcgtaaatgagaccttgtcaccagcgaagcttcgcaccggcgggcgggcatgatcagcggggagatccagcacaggcagctcgccctcgagctgcttcagccagtacgcctcttgcgttttgtacgcgtctcctgttttgaatccttcttgccatacggcataatctttatattgaatgcgcagcgccagaagcttccgattattgtacagctcgccgaattcttgaatcagaatgttgacggaaacaccgtctgaaatgatgtgatgcatatcaaccagcaacaggtgccgctcatctgatacctttacgatttgggcacggaacagcggcgcttggctgagatcaaacggtttgataaatgcggctgcggcctcctgttcggttcgttcgccgagaactgtagtctgtaacgtaaacggcacctcgtcatggatgcgctgcaccggatcgcctccttcgtcctgttcgaaggcggttcgaagcgactcgtggcgcttgatcagctcttggaaagctctgtccatcctttcagggttgagcttcccttcgagctctaacacagccggcatattgtagcctgtccctccgtcttccagctgctgaaggacataaatccgcttttgggcagaggaaaccggataggtttcctgtttttcagcgggcttaatcgcttcatatggactgtccgttccttcacggataacggcagccagtccttctactgtcggatgggcaaacacatcttttagcggcacctgtacatcgaattctttggcgatccgtgagacaagcgccgttgcttttaaggaatgtcccccgcggtcaaaaaagttgtcgtgaatcccgacagggccatttttcagcacgtcctcccacagctgagaaagcttcatctcagtcacgtttctcggcgccgtgtaggtctccgcatctgccgctccgccaggagctggcagggcgtttcggtcgagctttccgcttggcgtaaccggccactgttccatctctatcatataggctgggaccatgtagcccggcaacagtctctcaagctgtgcacgcacttcgtttctttggagcccttctacataagcgcataattccggctccccgctgtctgtccgtacggtaacagccgcctctcttacgccttctatgcttcttagtgccgcttcaatttctcccggctcaatccggtagccgcggatttttacctgatcatccgtgcgcccgaggaattcaacattcccgtcagggagccagcgcgccacatccccggttttgtacatgcgttcccccgggtaaaacgggtcttcaagaaaacgctcctccgttaatgccggccgattcaaataacctctggcaacacccgctccggcaatgtacagttcgccggcgacaccggaaggctgtacggctaaatgcggatctaaaacatacaaacgcgcaccgggtacgggcttcccaatcggaatccgcaaacgatccctgtcccgttctggatccaatacgtaaaatgccgcgtctaccgttgcttctgtcggcccgtaaccatggattaatgatacctgcggcaatacagaagcaaaacgggctgccgtacgcggcgcaagcggttcacctccggcgaatacacgcttcaggcttgtgctgtcacgcaacctttcgatttccgcttgatcgagaaagctgttcagcatagccggaataaaatgagccgttgtcacgttttcctgatgaatggcttttacgatcaatgccggatctttctcccagccgggcggaagcagatacgccgaagcaccggaaagcgaccaccaaaacagctgccacacagacgcatcaaaggaaaaagaggttttcaccatgacaatgtcatcttccgaaagcggaaactggtgctgcatgcctgtcagaaaggaaacagcctggcggtgctcaacggccactcctttcggctgcccggtagagcccgatgtatagatgacataggcgagagatccgccgtcagcaggagtaaactcatggttttctgctttttcgctcgcaagagatgtcatgtccacttcaagcgtttcgccagaaaagtttggtgcggagcatcccggctgtgtcagcaagagcgatgccccgctgtctttcagcatgtagctcagccgctcctttggatacgcaggatcaagcggcaaatacgcccctccggccttcaatacagcaaggacagcgatcagcatgtcaggtgaccgttcagacaggacaccgacgatactttcgtttgtgacgccgcgtgccgcaaggtgcgcagccagccggctggcgtacatatcaagctcagcgtatgtcagcgaaccgcctgaaaagcgaatggccagccgctccggtgtgaaagctgcctgtcgctcaaacagcccatgcagggtgaaagctttaggcgaaacagcttccgtcttgttaaactcatacaacaatttttgcttttctcttgtattcgtcatatctaattctcttataaagctgtgcggatgttgaagggcgttttccagtatggtaagcaaatgagattgtattcgtttaatatcctcaagagaaaacaaggtattttgatagtcgaaatttaattgaatggttccattgtctatccgttcttgtatttgaactgaaagctcattcgcggtgtatccgctgaaataaagcgctgtttcatagtcaaaatcatctgcattatgccactgaagtggctgatactgcatagatataccgataaggttgtgtaaatccttctgttcatttcttaattcatttacaagcaaattataaggaaaccgttgatgacgcataacagaaagctgttccctgcctattgtgcgcacaaaggaaagaaaatctgtgtcaggatcaaccgttattctgattggaagggaactaacgaacatgccgagcatttctttttcagcctttgaacctctgttgccatagtaggtgccaatggcaagatcttttttagaagtgattctgctgatgcatatgtaaaatgaagccataaataaggaaatgatattgatcttgtgttcttcgcagaagattcgaatcgtttgctctagatcaggtgaaagaatgatggtgtctctggatgcagatgtgctctgtttttgtaaggacgtctggtcggctaacgagtggtattccaacgggtgctcaaaggtttgtgtccaaaataaacggtcctttgcaaaccgcggagattgtagatattgactctctttttcgatgtagctcaagtaagaaggttccggctgatcaggtaaaggatctttctttttcattttttgataaagatctataatttgatttcccatcacatttaaagagattccatccattatgatatgatggaatttcgcaaatagccaaacttcatgagagtcaattctaaggaggtaaaattgaaaaagaggcgagttgaacagtttaaatggaatgctcgcttgatcctgaatccattgctctatttctatcatttcaacatttgaaaaatcaattattctaagtggataatatttatattcagtaaggtgcaatcgcggctcaagctcttctccttctaacagctgaaatctaatggcgtcgttgcgggagatggaatgattcagtgctccctccagagtatcaagctcaatattgcctttaaatttcacacaggctgtgagattgcaaatactggtatctggctccagcagttcggtaaaccacactctcctttgggcatgggttaaagaataagtatgttcgctcaacggattccctccagttctcataataagaggataagaaaatgtagaaaaaagcagaaaaatgacaataaaagaaattatatgactatataatccatatatgcactatattaacggatattttttaaagtacaataaaaaacattaaatttttataacatttttttgaatatagtattatttctttatttttcgtttctttttttatcaaatttccggatataaagtgataaaagtattgttttacataaggtcttatacactactttttaatcggactaatttgcttttgcccatcattcttctaattgttggaaggttcgacaaagcgttattacagacataaaaaaacctgttttctcttggaaaacaggtctgccgctattattgatttgccaaaatgacagcgatttgatcctcaatatcttttccatcctcttcatcaatcaatccatttagaagaatagagaaaacaagtttttttccgctctttgtttctgcgtaccccgatagagagcttaccgtactgagcgatccggtttttgctcttacttttccttgtgcaggagtgtctttcatgcggtttctcagcgttccgcccaccattctgtcaggattgcccgcaacaggtaaagaatttagataagccgagaaccaactctgatcctgaatgtcatataacagctgtgaaagttgatctgaggatacagcatcaatatgtgagattcctgatccgtctcttaagacgagtgatttagaatcaacaccaaattccggaagcgtactgtttaacacttcgagccccttttcccagctcccttctccttttttcactttccccatctcttttacgagcacttcggcatgtccgttattacttaatttcatgaacggcacaaaaagtttcgataaaggcattgagcgatgagagagcagcacatctgaagaactaggtgcttcacccgtcttgatgtcccctttcacagtaataccttgtttttttagtgactgcttaaataaatctaaggcatatccggcaggctcccagacagaaatccattcctttgtcttgtttgcgtcaaccggtacgctcccttcaattgtaatcgtgtttgttccatgctctctttcgattgtgaggtctttctctgaaccggcagcagtcgtttcagcatcgttctttatcgttatataatcggttttcggagagacagacacggcaggctcttccccttctttttgatttggggtgacctcaacaatcacagtgcctgcatcatagtcttcgtttggagacgctgttagagcggagattggcgcgccataatatgtgtattcatcgctccaaggcatatcaggtgataatcgcatgtcatcatgccacgtatcatcaccgatcagattgcctttaattacttttacgccggaatgtttcaatttctcagccattttgtcaaaatcagatggtaaaagtgtcggatcgcctttccctttcaaataaaggttaccattcagctttttccctttcagtgttccatccgtccggacctcggttgtaaaagaatagttctcgccaaggacagaaagtgccgcggccgctgtcaaaagctttagagaagaggcaggcctcattcgggtgtctcctgaatgttcatatagaacagcacctgtttccgcagagcgaacggtgatgccggccattgcgccttcgagggcaggatgatcagctaaaatcttatcgatctgcccggaaagtgcatcttgtttttcagcggcaagcgcagcctgatgcatataaggcaccgaagcaacgacgaaaagcagtaaaacagcaacataaagctttatgctttttttcattcatttccccgcctctctgcgcttcatcattggctattgatgattcagttcaatggtgatactgcttttagctgtcgtttcttctcccggctccagcacttgtaaaccagtgagtgacgaaggtaaatcaagattcactgcgtttgtcacccatgtgtaaggctcagggcataaatacccttgttttccgtccgcattgtatacaacccaatgtttaaactgttcatctgccttataaataatgctattatgtgcatgctgatgataaatgactgcctggttttctccgcccctcttctgataagaagataaaaagacatcatccagctgcttgtggcgcaaatccattccttcatgcaaagcttctttatacgggacatccatcagtttccctgtcggcagcaggcgttcatccaactcccattgctgatctgctgtcagggaaaataatgagctttctgccggaaatataaatgtagtatgataaccaattccccaaggaaacgcttcctttcctttgttcatgaccgtcgcatgtttaaatagagtattcccctttaccgtgtatgtcatccgaacgacggcatggtgaggaaattgcttatacacatgggggagcccagaaagatcaatttctgtttcaacaatcacttcttcatcagttttcttcgcggtcactacgttccacttttcatggtaaagaaacccatgaagatggttgtgtttatccttctcgttgatatcaaaatgatacgttctgccccggaaactgaatgtaccgtcacttatgcggttaggcgggaacaggattggaatgccatacaatgttggtgtgtcgtgaaaactttctgctgtttccggttcacgcaaaagctggacatttgttgttttgtccacgagagaaatgacgttgctcccccactcagggacaacaatcatttctagatgttcgttgcccgctttgatggccggcgttcccaaatacgtgattttctcaataaagtttgccatgtttactcaacctctccttgattcattgctagtataagaattcaatgtactgtaccatatttcctccattttatattttcccctatcaaataaaaaaacaccgttcaaacttatgaacggtgtgattcggaggctattggatgagacgtgtgatttgtttctttttccagacgaattgataatacccataaatcaacagcaagctgacggcaaacgcagctggataaccaacccagacgccgagtatttcaagctttgtatagtgagaaaggacgaaagcgacaggcacctctactccccagattgcaaaaatactgatgacggtcggccataaaactgttccgcttgcccgcatcgttgcagaaataatttgggcatttccaaacagcaaatagctccacaatgtaatcatcaaaagacggtgcgcaatgtaaagcgtctcttgctcggttaaaaataacgataaaatctgatgtgaaaaaacatagatcagaatgatcagtacgccgccaatgatataattcagccaaatccccacgcgaatgacctgctttaagcggtcaaactcgtttgccccaatcgattgcgcagcgaaaatagaaaccgcaataccaaggctgacggccggcatctgtacatagctggctacctggttgaccactccgtatgcagctgttgcattagagccgtaatgattgacgaatgaaataaccgctatctctgataatgagacaagaatcatattgatgcttgctgggaccccaagacgcagcaggagaaccagcagttccttatccattttcaaataacgacgcactgttttatcaaattgcagcgggtgttttcgctttcgtaaatacaccattaacacgagaaaagtcgcaatcgtggaaatgacagttgcatatgccgagccgtatatgcccagtttcggaaaaccaaacatgccaaggattaaaacaggcaaaagcgcgatgttgatgaccgtgctcacaatcagcgtataaaacggtgtcttagaatcccctgttccgcgcaaaaaggtagtatatgcaaaatataaaaacataaacggcatagcataaaataaaatacgtgcatagttagcgctgacatgaatgacattttcaggcgttcccattaaacgaaggatatccagggtgaaaatactgccgatgacggctaacacaacgcctaataaaaatgtaaacgtgagcgtcgtcccgacaacagcctttagccgttcctcatttttcgctccgtaagcttgtccgatcagaatcgaactacctgaaccgatcccaatcgtaaatgagattaaaagaaaaaataacgggaaaaaggatgatacagctgccactgcatcaacaccgagccatctgcctacagccatcatcccgactagctggccgactgattgcagcacattgctcagcagaagcggcaccaaaaagagtgacatcgaccgccaaactgatggtttgcttttcttttgagttacaagaggttcttgtgatgtttccatattaaaggactcctttatttgaaatcgtttttaaacatgccctcattttttgacaaaaacaggatatgcaacatgttattattcatcactgcacatatgaaacccttcccgattcttctaatttcacacatctttttagcttatgaagaataaactagcaagtaatggcgtattttttgtgagtaaaagaataaaaaaataatttatgcaaaagtattgtaatctatccgtaattattgtaacatttgtaacataagagaaagagattttgaaggagagagcgataatgaaaaaatgtcttctatttctaacaaccattgcacttattctgtcattaagcacaaatgcatttgcgaaaaatacatcaggcaatttatcacaaaaacaagcattacagttggcattatccgctagagaacatttttggaacaccatgagcggccacaatccgaaggtgaaaaaagcagtttgcccatcaggcacattcgagtatcaaaatcttcaatatgtatacatgtgcagtgatctaggcactaaagcaaaagcggtgaattatttaactcctatttttacaaaaacagcaatcgaaaaaggctttaaagattatcatttcactgtttcaaaaggaaaacttgctgttccaatcggtgacggagacaatcttttgaattggaaaaaatcaactgctaaactgatctctaaaaaaggcagcacaatcacatacgaatttaccgtccctacattagacggatccccttctgcaaaacggaaagtgacatttgtgaaagaaaataaaaaatggaaagtcaatcaatttgacgcagttatataagaataacgcccggtataagcgggcgttttttatttggtctgcataaagaaagacaacaggcgaaaagtgcctgttgtctttttgtgaatataacgctctaggagagattcgaactcccgacctgcagtttaggaaactgctgcactatccgctgtgctactagagcttttggtatttatatagtagctctgatgatcaatattttcaagcgatttgtattaaagccctccaaaaaccttatatgcggctcttgtcgtatcttcatcaataccgatataccgcattgtaattgatggtgatgaatgattcagtattctctgcagctcggcgatgtctttcgttcgctgataaaaatgatagccaaacgttttccggagtgtatgcgtccctatctcctcaagtccgcacgccgcagcggcctctcttaaaattctgtaggcctgaatgcgggaaatcggcttcctggtgcgcactgatttaaaaagatattcgttttccttcatgtctttcgtatactcgtatatttcctgtttcagcgattctaaaataagaatctttcttttctttttcgttttgctttcagtcgcccataaatgatctttattttgaacgtccttcacttgcagcggcagaatatcagaaatgcggagcgcgctgttgatgccgaaaataaacagaaaataatcccgcttgtttttgttaagcaaatactgtttgacttcttggattttctctagactgcgaatcggctgtacaatatgcatcaaaaaactccttaaaaacagttatgtaacgttttgaggtctatgttactattatagctgaaaaacgttgaatgtcaaagtgcggcggcgtttatgtaacataatatacatagtgttacataagcttttaaaaaagcttcttcaaaccttcaccctataaaataagctttaaagcctcttataaagcttttaacctcttggatacttatccccctactaatcatcaaaaatcctcttaaaacgcaatctgacgctcccaattttctggagcttccgcaaaaaaacataaaaaaaagacacaacttcaaattgtgtcctaatcctcatcctttacatcaatatcttccgggattggttcatttaatatttcctgcacaagtgctttgtaattctccagctgttcgagatgcgttttgaactgctctttataaatcaaaaattgctctccgtcatgaacggctctgattttcccttcgagcaccaagcttttaatataatcctctgaaagatttgtatattctgctgtttcttcaatcgttaaatacatatagcagtcccttcttaatccgtatgctgattctaatatagcacatggctcatatcaatataatcaattttgcacagaaaaacggcattatgcactatataatataccatttgtcacttgtgaaaacgctgtaatttttttacgctaagattgtaacaatacagcttcatataggagggagaacatgaaaagaacgtggaacgtctgtttaacagctctgcttagtgttctgttagtcgctggaagtgtcccttttcacgcggaagctaaaaaaccgcccaaaagctacgatgagtacaaacaagtagatgttggaaaagacggcatggttgcgaccgcacatcctcttgcttctgaaatcggtgctgatgtgctgaaaaaaggaggaaatgctattgacgcagcggttgccattcaatttgcactcaatgtaacagagccgatgatgtcaggtattggcggcggcggttttatgatggtgtatgacggaaaaacgaaggatacaacgataatcgacagccgtgagcgtgctccagcaggcgcaactcctgatatgtttctggacgaaaacggcaaagcaattcctttctctgaacgtgtaacaaaaggtactgccgttggtgttccaggcactctgaaagggctggaagaagccttggataaatggggaacccgttcgatgaagcaattaattaccccttctattaaactcgctgaaaaaggctttccgattgattcggtgttggcagaggccatttctgattatcaggaaaagctttcacggactgccgcaaaagatgtatttttaccaaatggcgaaccgcttaaagaaggagatacccttattcaaaaggatttggctaaaacatttaagcttattcgctccaaaggcactgacgctttttataaaggaaaattcgccaagacgctttctgacactgtccaggatttcggcggatcaatgacggaaaaagatttagaaaattacgacattacaattgatgaaccgatttggggagattatcaaggctatcaaatcgctactactcctcctccaagctccggcggtattttcttattgcaaatgctaaaaatccttgatcattttaacctttcacaatacgatgtccgctcatgggaaaaatatcagctgcttgctgaaacgatgcatttgtcatatgccgaccgtgcgtcttacgcaggtgatcccgaatttgtaaatgttcctctcaaaggcctgcttcaccccgattatattaaagaacgccagcaattaatcaacctagatcaagtgaataaaaaaccgaaagccggtgacccttggaaataccaagaaggatcagcaaactataaacaagttgaacagccgaaagacaaagtagaaggccaaacaacccactttacagttgctgaccgttggggaaatgttgtttcttatacaacaacaatcgaacagctattcggaacgggtattatggtccctgattacggtgttattttaaacaatgaattaacggattttgatgcgataccaggcggagctaacgaagtacagccaaacaaacggcctttaagcagcatgaccccgacgattttatttaaggatgacaagcctgtcctcacggttggatctcctggcggggccacaattatttcatccgttttgcaaaccattctctaccatatagaatatggtatggaattaaaagcggctgttgaagagccgagaatttatacaaacagcatgagctcttaccgttacgaagacggagttcctaaagatgtcctcagcaagctaaatggcatgggccacaaattcggcacaagtccggtggatatcggaaacgtgcaaagcatatcgatcgaccatgaaaacggcacctttaaaggtgtagctgattcaagcagaaacggcgcggcgatcggcattaatttaaaacgtaaataaattaaaaaactgtactcgcttcaaatgagtacagttttttatacacatctttaaaataaaaactgacaaacgtctttattctgctaatgcacgtctatcttcatcttttcatttcgtttatctcatcaagaaatgtctgaaacgcactcgtaataaaaaagtctttcctgtatataaagacgatctctaagtcttgatatgctggtggcagctgatgaatccatacatttgtacgatgctcggagcagtcaacagcggactttgggagcagcgccgtacccatcccggcggaaacaccttttataatagcctccaatgtgccaaactctatgattttttgattgtgtatgcctgcttcctctagtaatcttttgaccctgtcacgatgagaacagccagccccaaaaaagagcatcggctgctgaagcatgtcttctgccgtcccttctcgtgatgaaatcaaaactaattcatcataggagacatggagttgtctaaccgcagcgtgttcaaccggcccatatacaaaagcgccatcaactttatgatcaagaacctgttgaatcaaatgatgcgtatcagctgtgttcactgataaatccacttcaggaaaacgcctgaggaaggatgctgcatgctcaggcagatgcgttaccgccgtcgtttccagtgatccgatccgcaaaggcccttttggttgcctgctcattcgggtcgatttttcagcttggtctaacagcgataatacttgatctgcatattgtaaaagattttctcctgcagcagtcagcttcattccccgattcgttcgatgaaaaagcctgatattcaaatcttcctcaaggttatgcactctggctgtcacattcgactgaacataattcagcatttgggctgctttcgttatgcttccttcgcgggcaacagcctgaaaaatctttaaatctccgctttccacgcgctctcacctgcttgctatgatgaaaagtgatattggctatcatatttgttcattttactcgaagaaaaccgctatgtaaaatatgtaaagatatgaaaatacaattcaatgaggaggcagacagcatgaaagctataattcacaacggaaaagccggtcttctggggttatcagttcaggacgttccatcaacaaagcctggatacggagaggtaaaggttaaattaaaatctgcaggcctgaatcatcgtgacttgtttcttatgaaaaacaaatctgaacaagatcctcacataatactgggttctgacggcgcgggtatcatcgaagagattggtgaaggcgtgaaaaatgttactgttcagacagaagtagtcattttcccgacattgaactgggatttgacagaaaatgttccacctgtacctgagattctgggaggtccttcggacggaacacttgctgaatatgtgatcattccttcacaaaatgcaatcaaaaaacctgcttatttatcttgggaagaagcgggcgttttacctttatccgctttaactgcatatcgggctctgtttacaaaggggcaattaaaaaaaggcgagcatctattgatacccggcatcggcagcggtgtagcaacctacgctttatttatggctaaggcgattggggcaacagtaagcgtgacctcccgcagtgaggagaaaagaaaaaaggcgctgaaattaggtgctgattacgcatttgacagctacagcaattgggatgagcagttgcagggaaaaaaggcggatgttgttcttgacagcataggacctgccctcttttcggaatacttccgccatgtaaaaccaaatggccgtattgtcagctttggggcaagctcaggggataatctcagttttccggtgcgttctctattctttcctcaggtcaatgttttgggaacctcgatgggaagcggtgaggaatttcaagctatgctcgctttcattgataaacataagctgcggcctgtaattgaccggatatatcctttagaaaaagcatgtgaagcatataaaagaatgcaggaaggcagacagtttggaaacatcgggatcgtaatggaataaaaaaagaaaccggctggcagccagaccggtttctcttatatgataatcccctttatttacggaagaactgaactccccatcaaatatcgatccacttcacgcgccacttctcggccttcattaatcgcccatacgattaagctttgccctcttcttgcatcccctgcggcgaatacaccatcgatatttgtttgataatccccatatgctgcactgattttgttatttacagaatcaacaccgaactgtttcaacagcggctgttctgtgccttcaaagccgatagcgataaagacaagctgagcaggccatactttttccgttccaggcagctcgcggaactcgtatttcccatgctcatttttcactttttccatttggatggtatgaagctctttcagctttccgtttttatccgcaaccatttttgtcgtttgaatggagtattctctcggatctcttccgaattttgcttctgcttcctcgtatgcatattcaagcgtaaagacgtgtggctgttcaggccacatattgtcattcgtgcgggctggcggaagtttcgggtgtttgccgaattggtgcacgcttttggctttttgacgcagagcagtagccacacagtcagctcctgtatctccgcctccgattacgatgacatccttccctttagcatcaatgaattgcttgtctttaaaattagaatctaaatagctttttgttgcaagtgtcaggtagtccattgcgtaatggactccttttgagtcgcgtccttcaattaagaggtcccgctgtttttgagcgcctgtgcataggatcacagcatcaaattgctcctttagctcatcagctgtaatatcaacaccgatttctgtgttcgtgacaaaatcaattccctcttgcgtcagcaatttaattcggcgttctacaatgcccttctcaagcttcatgtttggaatgccgtatgttaaaaggccgcccgctctgtctgagcgctcaaaaacagtgacagaatgccccgcttgattcagctggtcagcactcgccagtccggctgggcccgacccgacgatagcaacttttttgcctgttcgtttttttggaattctaggttgaatccagccgttctcaaatcctttatcgataatggtccgctcgatgtttttaattgatacggccgggtctgaaatcgctaaagtgcatgatccttcacaaggagcgggacatacccgccctgtgaattcaggaaagttgtttgttttcaacagacgttccaatgcttccttccatctgccccggtagacaagatcattccattcaggaattaagttgtaaatcggacagccggatgtaaatccgttaatgtccgcaccgatctggcaaaacggtgtaccgcaatccatacaccgcgccccttgccgtttcgatgcttcttctgaaaaaggagcagaatattctttccaatcctttaagcgagtgagagggtcccgctccgcaggtttttctcgtttgatctccataaatccagttggtttccccatgttcctctccccttccttactgtactaccgcttgtttttgtcccgatgctgctgtattctgctttggcttcgtgttggcctcaaaagcgaacatgatggcttcttcatctgataaacctgcagctttttgctcttcgatgcttgcgagcatttgtttatagtttttcggaatgactttgacgaattttttcacactgtcttcccattgatctagcagatcttctgctttttggctgtttgtatacgcagtatgtctttcaagcattgctttgatttgctggatttctttctcatcctctaatgattcaaataaaatcatctcaaggttgcatttgcgtttaaacgctttgacatcttcggtcagtacataagcgattccgccggacatacctgccgcaaagtttttgcctacatcaccgagaacgacaacgctgccgccagtcatgtattcacagccgtggtcgccgatgccttctacaactacgttcacaccgctgtttcgaacggcaaagcgttcaccagcacgtccgttaatatatgcttctccgcttgtcgcaccgtaaaaagccacgttgccgataatgacattgtcatccgaagcagagttgaatccttctggtgacttgacgatgatttttccgccagaaagcccttttccgacgtaatcatttgagtctccgtctaaataaagcgtcatccctttaggaacgaaagctccaaagctttggccggctgatccggtaaagtgcaacttgattgtatcttcaggaagaccttcttctccgtaacgctttgagatttcactgccggttatcgttccggctacacggtttgtattgttgatttcgatagaaacttccgcttcttttccagattcgatggcttcttgtacggccgggagaatcgctgtaatatcaagtgattgatcaattttatgattttgcggcgattggaacgtccgcaccccatcaggctgataaagaagggtagacaaatcaagctggcttgctttccagtgctcctttgcccgttcacttacatgaagtacatcagtgcggccgatcatttcatcaaatgtcttgaagcctaacgcagccatatactcacgaacttcttcggcaatgaacagcatatagttcacaatatggtcaggatctcccatgaactttttgcgaagctctggattttgtgtcgctacaccgacagggcatgtatccaaatggcaggcacgcatcatgacacagccgagtacaactaacggagccgttgcgaaaccaaattcttcggcgccgagcaaggcagccatcacaacgtcgcggcccgtcatgagctttccgtctgtttctaatacaacacggtcacgaagtccgttcagcattagtgtttgatgtgcttctgcaaggccaagctcccacggaagccctgtatgtttaatactggttttcggagaagcgcctgtacctccgtcatagccgctgatcacaatgacatctgcagtcgctttggcaacacctgcagcgattgttcctacacctgcttttgacaccagctttacgctgattcttgcgtcacggttggcatttttcaaatcgtggatcagctgggctaaatcctcaatcgaataaatgtcatggtgtggcggaggtgagattaatccgacacctggcgttgacccgcggacatcggcaacccatggatataccttgttgccaggaagctgcccgccttcacccggcttagcaccttgagccattttaatctgcagctcatcagcattgacgaggtaatggcttttgacaccaaaccgtccggatgcaatttgtttgatcgcacttcttctatcatcgccgttctcatctggaacaaagcgtttgggatcttctccgccttcaccgctgttgctttttcctccaagacggttcattgcgattgctaaagcttcgtgcgcttccttactcaaggacccgaatgacatcgcacccgttttaaaacgtttgacaatcgattcagcggattcaacctcctccaacttcaaaggcttgcggtttccgtcaaatgcgaacaagttccgcaaaaatccgatgcgttcttcatcagccgcttttgtatactgtttaaacagattgtaatcatttctgcggcacgcccattgcaaagtatgaatcgttttcggattaaacgcatgatgctctccgccatttctccattgaaagtcacttcccggttcaagcgttttgctgtaatcatcctgatacgcttcccggtggcggcgctgtgcctcttctgcaattgtttgtaaatcgatgccgcctagctgtgatgcagtacctgtgaaatagcggtcgatcacatcgcggctgattcctaccgcttcaaagatttgggcgcctctgtagctttgcacagttgaaattcccatcttggacatcacttttacgacgccctcagtaatgctttttccatatttgctgaccgcttcttcatagctgatatccaaacggccttcatcaatttcctgcttgtaggtcgcataagcgagataagggttaatcgcatctgcgccataaccgattaacgctgcaaagtgatgcacttcacgtgcttctcccgattccacaataatgctgaccttcgtacgcagccctttgcggattaagtgctggtgcagcgcgcttactgccagaagcggcggaattggtgtcagtcgttcgttcatctttttgtctgataaaattaacaaacttacgccttggctgatggctttctctgcttgtgtgaacatgtcctttaatccgcgttcaagatcctctgaaaacagcacatcaattttttggctttttaaatctggatgaacaatcgttttcaatgcgtaaaactgttcattggataaaacaggtgtatacagtttaatccggcgaacatttcgttcacttggatgaagaagatcgccttccgcaccgagccaagtcatcgttgaagtgacaagctgctcacgaatcgcgtcgattggcgggttcgttacttgtgcaaacagctgtttaaagtagttaaacagtgattgcgctcggtcagatagtacagcaagcggagcgtcattccccattgaaccaaggggatctttgccttctttaataacaggaattagatacttttggatatcctcatatgtgtatccgaatgccttctggcgagtaagaagatcactaaattgttcttcttctcttgactccggatcaggatttacttgtacaagctcttcttcaagccatttttggtacggatactcagttgcaatttgtgttttgacttcctcatcggagataatacggccttcttccaggtcgattaaaagcattttcccaggctcaaggcggtttttatataaaacgttctcctgttcaacttcaataacgcctacttcagatgagaaaataatataatcatcttttgtgacataataacgggccggacggagaccattccggtcaaggattgccccgatttgtttaccgtcagtaaatgaaatggctgtcggtccgtcccaaggctccatcagggagctatggtactcgtagaacgcccttttttccttggacatatgcgtattttccgtccaaggctctggaatgagcatcattgccgtatgtgccggtttgcgtccagccatcacaaaaaactcaaatgcgttatccaaaatggaagagtcactgccatcagcattgagaatcggcaaaatcttgtttaagtcctcaccgaagctttcagaaacaaattgctgctcacgtgctctcatccagttgatatttccgcgaagggtgttaatttcaccgttgtgaaccaaataacggttaggatgcgctctttcccatgtagggaatgtattggtactgaagcgtgaatgaacgagcgcaaaagcagaaacgaatgcttcgtcttgcagatcagaataaaatgcatcaacctgttcaggtgttaaaaggcctttgtaaacaatggtctggcttgaaagactggcaaaataaaaatcaagatcttccgttactccccaattttcagcctgtttacgaatgacatacaattttcgttcaaaagataaattgtcctttagatcagaacttgcgccgataaatacctgacggacaaacggacagcttttttgcgctactgttccgatttttccgacatttacaggtgcagttctccatccaagaacgacttggccttcttgttcaatcagtgcattgatttgcttttcaattttttttctttcatcttctttctgtgagaaaaagaccattcctaccccgtaacgttctttttctggcagattgatgtctttgcactcttttctaaagaaagcatcagggatttgaaccagtaagccggctccgtctcctgtatccggatcactgccttgccctcctctatggtctagctggcaaagcatcttaagtccttgtttgacaatgtcgtgagtctgcttgccctttaagtgtgcatataggccgattccgcatgcatcatgttcaaattcaggacggtagagaccttgagcttttggcatttgattgtacgtcataattcctctcccccgatcaatttccgataataccggtcataaaatctaacaactctataatcattgtaggttttcaaaacgatataaacaatatataatttagatcaaaagaatctcaaaatgagatagatggatgtgagacaaacatggagctgcgccaactgcgttatttcatggaggtggctgaaagagaacacgtttcagaagccgctgatcatttgcatgtggcccaatcagcaatcagcagacaaattgccaatcttgaagaagaattaaatgtgaccttatttgagcgtgaagggagaaatatcaaactcacgccaatcggaaaagaatttttgattcatgtgaaaacggcgatgaaagccattgattatgcgaaagagcaaattgatgagtatcttgacccgcatcgcggaacggtaaagatcggctttcctacaagcctcgccagccagcttttgccgactgtcatttcagcgtttaaagaagaatatccgcacgtcgaatttttgctgcgccaaggctcctataagtttctgattgaagctgtcagaaaccgcgatattgatctggccttattaggaccggtgccgacgaatttctctgacataacgggaaaaatattatttactgaaaaaatttacgcgcttgttccattaaatcatccgcttgctaaacaaaaaacggttcatttaatcgatttgcgcaacgaccaatttgtattgttcccggaaggatttgtacttagagagatggcaattgatacttgcaaacaagcaggctttgctcctctcgtttccacggagggtgaggatttggatgctatcaaagggttagtgtccgcaggaatgggcgttacccttctgcctgaaagtacttttgctgaaacaacacctcgttttactgtgaaaattccaattgagttccctcaagtaaaacggactgttggaatcattaaaccgaaaaatagagagcttgcgccttctgcgaatgatttttatgagtttgtcattcaatttttctctaagctggagcagtatcaataaaaaaatgaacccgagcttctatatagaagcttcgggtttttttctgcaaattaatttacaggtaaagaaaaatccacatggcaaacaaaggcttcttgatcaattagagctctgtttgtcagttccttgttcttttccggttcttgaagctgtacagaagagtaattgacgattccaaggccgatttccgtcccttttgaatccattagccgaacaactgaaccgcttttaaatttccctttaatcttctgtacaccgtctaggtataaactcgattggccgtttgttatttttcgtgaacaatcatctgataaaatcatttcaccttccggaccggaattaaaagcgatccattgctccttttgattcaacggaagcgttccttctgcttcaaaataggtgccttccgcctgttcatgaacggcgtgatataaaatatcgccggcatctgcctgaccaaggaaacctttaatgccagacgccattacgattttaaacgcatcaagcttagagcgcatgccgccggtgccaacgatgcttccagtgtcacctgcgcatgcttcgatgtcaggtgttatttcactcacccgctgtatccttttcgcttctggatttgtgcgcggattgccgtcatataatccgtctatatctgataaaatcacaagcatatctgcatcaatcaatcctgcgacttttgccgcgagtgtatcattgtcgccaaacttgagccgattgacggtaactgtatcattttcgtttatgatcgggatgatgccgcgctcgagcagtacattcattgtattcctgacattgttgtatcgatattcatctgaaaaatcgcttcttgtaattaaaatttgggatgcgacatagccgtgtgccaaaaacagctttgaataagcctccatcagcaatccctggccgattgaagctgatgcttgtttttctggaagcttctcgggcctttggataaatccgagtttccgatatcccgccgccactgcgcctgaggaaaccaaaattacttcataaccggcgtctttgagtttgacgacctggtcgaccaacgcttctaattttcgaatgctgatttctccatgaaggcttgttaatgaactgcttccaatcttcacaacgactcttttcatgcttgtatcaggcgtcactttatcactcctgatagcggcgctgcagttttttcgatatcttcgctgatttcctttgaacgcttagccgcatgctttatcgcttgagaaatcgcttctccgccgccgctctttttcaaggcttgcagccccgctgctgtcgttccgttcggtgacgtgatattatctcttaagatctcaggatgttctcctgtttccatgagcatttttgcggcacctaaaagtgtctgtgcgccgatgcttcgagataactgtttatcgaggccagcttcctcgcctgtcttttcaatgaattccattaaataataaaaatacgcggggccgctgcctgcaattccggtgaatatatccatttgattttcttggattgtatagacttcgcccatgcatccgagcaatgcttcggccagcttcttcaggtcttccgacacatattttccaagggcaatagctgttgcagaagcgccaatcatactggaagtgttgggcatcactctgacaaccggctgttcattaagcaatgattgttcaataaaagaggtagttatgccggcaaggaccgacaatattaattgatggggttgaatacgtgattttagtgatgacagagcgttttcggcgtcttttggcttcattgccaaaatgagcacatccatgtcttcaatacatagttggttcggcaaggcgcctttaatgccatattgaagttcaagttcagttaatcgctctgtattgctgcggtttgtaacgcagatgttttgtttcgggattttgttggcacgaacgatacctgatatcattccttccgccatagatcctgctcctataaaggctactttcttttgatcaaagatcggtaacatctcctttgttcgcttttttgttcgcattttcacacgtttaaaatgttaccacgtgaggaaatgatgtcaagtttgaaggtcatcattgatttgtattgtttcttttcgacaaatatgtataatgaaaagcagaaaacacccggttcacactgctgcgccgggtgtttgtttctattaaaaattatctgagagagctttttcaatcagttttttacagcgatccagctctaccttcagctgttttttatatagcttggcggcttcgtaatctttaaattgatagaggacgacttcctggagcttagccccttctttttttactttaatttgttttagtatcccgtcatcaagaagctcatgcaaagaccggtatacttctgtatgatttggtttaaaaccaatctctttaaattcagaccgaagtacttcaagcagctttaacccatagagtctctcttgctctgtcatcgttatcatataaagcttcaaaaatgcgcgctgtttcactaaaaagcctgttgaactccttttttcttctttcatcatatgcactccttcttctgtcactgacaacactatgtactaaatattcaattttcttttattgttttccttctttatattaaagactgatagtccagtcatttcatatttactgattataggtgtagcggaaaaaataaatttcgactgaacatttggtacatagttttcttagttctattatagcctgcattcactgccagcttcaatttaaaacgattgtcagatttgcatatgccggtatgaatttcattcaaataaaaaaacctgtcgaaagacaggttttcatttttaaggatttgttgaccataatcccgctgttttgatgaaaatgcgtggatctaatttcaattgtgccaccatgtactcagcaagatcctcaggctgcatcactttttcagggttaccgtctgttaagttcaattcgatagacatatcactagcgacagtgctcggcgttaacgcgctgactctgatattatgttttctcacttcttgcataagagactctgttaaccctagaacggcaaatttagaagcgctataagcacttgttacagcagctcctctttggcccgctgtagacgaaatattaatgatatctccggctttgcgttcgatcatttccggaagcaccgcgcgagtcacatgatacacacccattaggttgacttgtataatattttcccattcatcggctgacagatctaagaaaccgccaaatttgctgattcccgcgttattaatgagaatatcgatatcaccaagctgttctttcacttgagcgacggcttggttaacctgctcggcatcttttacatctgcagcagcaaatgcagcttttacaccaagcgctttgacttcttctgccactttttcaacattagcggcagtccggccgattaacccaatatttacgccttctttcgcaagagcaagagctgtagcacggccgatccctctgcctccgcctgtgattagtgcagttttatgttgtaaactttgcaattgaagcaccctttctttgtttacatatgtacgatatcacattataagtacaatacatccaatacgcaaatcaaacgaactgtgtaaatatcatttcttctgattaaaaaagcggatacagggtaatgacataagaaaaggagtgaacatatgattatagtttatatcagtcttgtagtattagcagtttctattatcttcttaggagttaccgtgattcaaaacaagaaaaaaatggaccctgcactaaaggagctttcctctgttacgcaggctatgcaaaaacaaatcgaaggattaaaaacagaaacagagctgctgacgcaaaaacaaaagaagattcagcaggatgtccaaataaaaaaatacacgtttcagcagaccgcagctgaagtgaaagaagttccccaagcagtcaaagaggtgtggcaggcaggacattttaatagcagataaggatgaatgagatcccgttgttacgatcagaatggacaaatgggatctcatttttcgaggaggcttacacatgattataaaccgcagctgcttaaaagagttcgcagaaaaagtacattttcttccctcttcacttacaaagtccgatttacttactgatccatttcgtctccatcaagaaaacgaacttggcatctactattcacctcataatgaatttatcaatcgggatgcctcgcttgtgattgccgggatcacgcctggtttttcccagatgaagacagcgtacgaaacagccgccgaaagcctgcggcaaggcgggactcttgagcaaatggcagtagacacaaaaatagcagcgggtttctccggatcgatgagacataaccttattaccatgctggatttatgcgggctgccgcaagcttttggcattcaaagcgccgcaaagctttttggagaattacggcatatgctccatacaacttccgttattaaatatcctgtctttatccagcaaaaaaactataccggatacaaaccggctatcactcattctcctatcctaagcacttatgcttttgggcacttccctgcagagcttaaccatgtgacgggaccagctcttctcattccgttaggaaaagcggccgaaacagtgtgtgaaacattgatcagacagcacagcctccagaatttgatttgccttaacggctttccccatccatcaggcgcgaacggccatcgtttgaaacaattcagcaaaaacaaagagcaactagaaagacaaattcgttcctttgctgcattggttgatttcgctatagaaaagaggaaataaaagggatatgataaacaaaaacacaaacgtggggagtggttgaatgtttcctatattagaaacggatcggcttatacttaggcaaatcacagatcaggatgcggaagccatttttgcttgtttctcaaacgatgaggtgacacgctattatgggcttgaaaacatggaatctatagaacaggccatttcaatgattcaaacgtttgctgccctctatcaagaaaaacgcggtatacggtggggaattgaaagacgggacactaaagaactgatcggaacaattggctttcacgctctggcccaaaagcataggcgcgcggaaatcggttatgaaatcatcccggagcattggcgaaacggatttgcatcagaagtcatttcaaaggtcgtatcttacggattttctgcccttggactgacgcgtattggcgcagttgtatttaccgctaatgaagcatcaaatcggctgcttctaaaaatgggttttcaaaaagaaggcgttttaagacagtacatgtatcaaaatggaattccaaacgatacaaatgtatattctattttaaaatcaagcaaatgaacggacgacattctctcaatctgtatgcacactcccttcctcttcttggtgactgcccaaaatagaaggggcagccagcctctgcaccgactccagtatgggacagtaaatgctaaatagcctgatagaacacatcacaaaatatagtgaagaggcttattctttttcttgccccgcatgaatgatctgtgatgtaccaatggtttggccagaagaattcaatgctttcacctgaaaatatggcccaatcgaatgaacaagaatatctgtttcaaatccggttcggggagcatccgttcccacctcagacaatttgttaggtgctgtaccagctaacactttccaggctacagtttcagttgaaccgttccatgatgcataaacaatggctgcatcttcacataatggatttacagcaatactgggtggataaaacggcaagcctacccatttatccttaaacgccctataagaaagattttgaccaggaaactgcatatcatataacaaattcaacgaaggatcttttttattattaccagcactcctatattcagaaagatacggttcctgtccccatccaacgaattgatttccatttgatagtttctgaacatttccttgacttggaacatacagcgctggatcatgataataagttcgatctgcttttgcagtcatgttatggaaatcaagttgaaggattaaaccacgagcctctccctcaggcggagagcttgaagaagcacaacaagcatcatcaaatagacttatccgtgttctagacctaaaacgtgcatcatgttgccaagaaaatgttgcatttggctcaaaagtaaaatcgctttttttgccaccaagctgccagacaatctttcctgttgttttatcaaccaaataaatcgcccacatgttacgcatgcttattagaagagtattgttcggcccttcctcaactgaattcacgtgaaaacagtcccaaatattgttagcgcttgtggcggatgacgcaggtaacatcgagtcatccggattaacatgagcaagcacatcccagaagaaaagaagctctcctgtctcaagatctacttcttgaatggaataattgtcaaagtacccatctgccggacctccatacattgtgagatccgctggcacttgtttcacagcagtaaacaaagccgtatcttgctttgtaatcgtaaactcgtgaacatcagaggtaaatccttttttggcggtgagtttcttaatcactttataattctgattgatgatttgataaaaagctccaggttccggatcccccgccgggagattaggatcattagactgagttccagatattgttccttgccacatggtaagaacgggttcccctttgtaggattgtaccctaaagtccgtattttgtgtaaatctactatcaagaggtctaaaccatactgggttaccagcttgatctatgatcaatgcacctgtttgcccaatcatagttgcgccgaacacagtatagggtgcaacgaatattaagccgggtgctgtccctggcttgttgacatttatagaaaccttcataggatgcagggtaggagccgaaacaaagttccattcttgtgagcttgaatgatttgcggatgccttatcaccgcatcccccataaatggcacgcataattccgtatcgggacagaatcccgggttttcatcacataatgatttggcaaaggcaggattttgttggctgaggtttttaaaataacagacaatctcatgattgcgaacaggtaaactgttcagttgaaaagagagcgttaccttcttgtctacatgttgatagagtaatccttgctttgtaaatggaggcggatatgcttgatccggcaaggtgggaataatgtcatggatattgaaaatacgaatactattctttaccgtttggttgaaccgggacgcaaagacagggtcagcgactcgagggctgccataagtatacacaaaaggatttttaaatcgggtattcaccgcaatatcaaaagcggctaacacggctaaagctcctcctaaactatggcctgcgactaataatctttttgctgcataaagcttggttaattccccgatcagctcatttcttgtcgattgataaagacatgtaaatccacgatgggtttttcctgcatttctgacaaacggatatggtacttgatataagtcttggtccgactcattgtccttaaatgttcgggttcctctaaaaattacaatgatctgatcttgtgactcggcaataaaaccaaatacttcagcttccggatcctcaacaccagcaagagctcgtatggtatatcgaaggctatatccttttggcaagacaagcggttccttttcaaagagttgatatgactgatagatcatggccgatagcaatatcgaatcctcacggttaaacatataatataagcttgagtgattcatccgagcagctcctttcttttattcctagcatgttcctcgaaacggagtacacatgtcaggatcgggacaaaaccctggatttttatcgcataatatttcggagaaatcaggattcattttactaaggtatttaaaataacaagcaatcgcatcattgcgcggcgtattattcaattgaagagagattggatactttgtttttacatggtgatagtataatccttcctccgtaaaaggtggtggatacttttttgctgggaaagttggaaacgagtcatgaatatttacaattcgtatactatttttcaccactttgttaaattgggaagcaaagacagggtcaccgatacgcggactgccatacgtatacaagaaaggatgattaaacccagtgttcgcagcaatatctaaagcagctaacgttgccaaagctcctccgtagttgtgcccggtaacaaacagcttttttgacttagaaagtttatttatttgtctgattaaattgtttcttgttgattgataaagacatgtgaatccacgagacgttttcccgccatttttaacatagggatagggaacttgaaatatgtcataggatgctaaaagatccttaggatatgctgcgtatcctctaaacgctataacgatttgatcttgtgactcggcaataaaaccgaatacctcttccataggattctctacgtcagcaaaagcacgaatagtatatcgaagtttaaagccttctggtaaggtaagtttcccttctaaaaagaatggatatgtctgatagctcattgctgcaagaaatattgcggctttgctattaaaaatattgtttttatctaaagaaaccatatatacgcaatccctttcttaatataggtaaatatgatgttaatggtacaatatgaatgaaaacccggaattgctaatgatggtgatatgaacggggatatgggtaaagaaacgtggaagttacttaatgacggaataaaagaaaatgtaaaaagacaaaaagcgccctgttgcaggggcgctttttgattaagatgcatattgaggagatgtatcctcctttactgctttttcttcaggtatatgaatgcatttcgtcatgattgcactcgcaacgtaaaggaccgcaaagatccagacgacgccttgcgcaccgacgagaccgatgaacaaccaagcaagcgcgggaccgacaaacgctgataaacctgcagccaaattcaatacagacatggctgcccctttgtcttttccggccaccgtcggcacaattgccccgatcggcacatagcctgccagcaaacctccccaaataaagccgatcacactgacaaccgctacacttccgccggagaaaaccggtgcataatataataagacagtgaaaatgccgcagccgactccgccgaaccaaataacagtatttttccagccgaatttatcgccgacaataccaaagataagattaaacacaatgttccccagaaaaatcgttccccaaatttgcagccacacattggttgaaattccatgctgggccatgtgcatcggcaaaaagactggaaaaccatatgtaccaatgctgttgatgattctgatgattccgcctgtaaacacgcgcggatttgtaaataaaatcgtaaccccttttaaaagctcctcggctgtttctgatctttttcttttcttcttttcaaaacggtctttattgataaacaatgcaaagaatgcaccgagacatacccagaaaatagagctccaaagcgtattcaaataaccgaacgctttgatcgcgtagcttgagtaccaagcgccgaacacaaacatgccgaggcaatatgctatccaaaaccagccgacagcagtgctcagtttgctttgcggtgttctgtaaatgacccatgtcaagaaagaataagcaaaaagcgggtaacctaacccttttacgaagtaagtcacatacatcactggcaggttcagctgttcaaatccaaatacgataaaagcagctgtaccgatcacataaaacaacagccccataaacatcgttcgttttgcgccaaatgcttcgagacatacacccgaaaaccaggaagctatggcaagcgcaattccgtatatactaaaaatagaagcggactgctgaacggtgagcccgttttcgatcaaaaaaggactgagccagccttgttcaaggccatctcccatcataaacaaaacaacccctaaaaatccccaggcaagccgcttcggtattcctattttatccaacatatctgtctcctccttagatgcttatatccattaccgtattaccttattaaagttgaaaattaaatgattcctcaaaacagcaaaaatgctgccgccttaaatcaatactttgctttctgaacctgaaaaaaagcgctgtgtttgcttccatttctcatataaagccaattctgtctgacagtccttcggttcaatcacccggacatttgctgacatctcctccgttaattgaaaggtttcattgcaaatgactgcagcaccaacgacagatgcctgatgatatccctcttggacatagacctttttttgaagaagatccgcgatatattgagtgagcactttgctttggaatccccctccgcacacccaaacatagtcacgttcaaacggagtaacctctgttaaaatgtcaaagttccatttgattgaaaatgcgatttcttctagcgctgcacgtacaaaatgtgccctctttaaatgtgctgacagcggggcatcaaaaagaaaaccgcctctcgttaatgcattcttttcagccgataaataagagccgagagccgctacacatgcatagtcttcttttgcaagtgcagaaatctcctcctccattacttcgtacgtttcattcggataaaaaatctgttttaatttttgataattcaagccggtaattcccggattcgtttccacaagccaatgcccttgatctgtatgacagttcagccaggctttatgttttgtgtcgccatgatccgcagtaattttggttattggcgttgttgtccctgatacaatgacaatgtcctcaagtccagctccggtgcttttgacagccagctgtgtatccccgccccctgctataaccttagcatttattgaaaggcctaattcggatgcatattcatttgctatcgttccaattgctgttcccgctcttacaagaggcggaaggatagatggagaaaagccgaaaatgtcgcacatctcttctgaccaagtgttttgcttcacatcaaatagcagggtttctgttgcctgtgatggttcatatgttaatattccgctcagttggtacgtcacccaatcactgatgcttgtaaagcttgcagtcttttcccataaagagggctggcgctgttttaatccataaagcttgagcgcagaaaaaagtgcagttggcaggcggcctgtgcggctgtatatctcttcccgatcgggaatgcccgcctcccactctcggccgcgattatcgatgttcggcagcccgagaaaaggattgccgttttgatcaatcaaaacaatcccctgtctttggctcgtcgatgtcaaaccaatgatgtcaatatcacgcgaacgggatagcgcacgttttgccaaattcatcacctgcttccacagcacctgaggagaaaaataacggctgtccgggtaaagcgtctctgtggaatactcgatgtcctcccgttcaactgttagaacactgccagttacactcacgaccgctaccctcgcattgcctgtgccaatatcaaaaacgagatagcctttttgttttttcattctcttagcctcctttcttatacccctgttttcagttcgtccttgttatacattgtcggaatattaagagttttttcacccttccactttttgagggctttattcagtatcgtcacgtgatgatcctccacttcaaatgttgctccagcgagatgcggtgttgccagaacattaggcaatgaaatcaattcataatctgattcctctggaggttcatgataaaaaacgtctaatatcgcacctctgattttatgttcttttaatacagataaaagatcttcacggtttacaacaactgctcttgaagtattgacgaaaatcgcactctgtttcatcagatcaaaatgcttccgatcaataagtccaagtgtttcctcagtacgaggcagatgtacagaaacgatatcactgtctgaaaacaccgttttaagagatactttttcatacagcggatgatcgtcttgaatgtatggatcgtaatactttattttacagtcaaacgcagtcagcagttttgcaatcctttggccaaccgccccgaacccaatcatgccaaccgtttttcctgttaattcatttcctttaaatttgacataagcctgcaggtaatcactgttccactttccatccttcagccattgattcgaggcgctggtatggcgcagaaaggaaatcacatttccaataaacatttcagcaacggcttgtgcattccgccctggtgtataaaaaacaggtatgcctctttttgaggcagctgccacatccacattagagggcattcccctgcaaacaccgacaaatgaaagttcgggaacagaagcaaatacgctgtctgttacctgatcaagttcagtaatcaagcctgtcgcatttgttgcttttagcagctgaatgagttcatcttcccgatatgccctaccttgttccttccaagattgataagtaactgagccaaataagttttcaagctcttttcgtccttcttcgttgtacggtgctgtaaccaaaaccgtcatggtgcaaaacatccttttcattgtatttttcataaaaaaaatctctttccgaagatggaaagagattcatatataggcgcgctctgttacaggcagacgccggtataaaccttgctttcctatctttcaagctgacgcttgctggaattggcacaataatgttgccgaggtttcatagggccagtccctccacctctctggatagaaaatgttgagtatgtaattttcagaataaagaatacgtttatcataaagaagtctcagattgatgtcaatctcttttttcagaattgacgttatgatccgaaatgttataattcttacaaaatatctaactagagagaggaactgggccatgaaatcttttgccacacaacaaaacggcattttcaaatccgtttgctcgctggactgcccggatcagtgcggattgttaatacataaaaaagacgaaaaaatcgtaaaagtgcaaggagaccctgatcatcctgtcacagccggaaacatatgcaacaaagtccggaatatgacggagcgcatctatgatgaaaagcggctgactacaccgctcaaacgaacaggtgctaaaggccaagcgatatttgaaccgatttcctggaaagaggcaatcgatacgatcacctcccgctggaaacagctgattgatgaagagggagctgaaagcatacttccttacagcttttacggaaatatggggaaattgacagctgaaggaatggaccgccgctttttttaccgcatggggtcaagccagcttgaacggacgatttgcagcaaagcgggatctgaaggctataaatatacaatgggcataagcgcgggaatcgatcctgaggaaaccattcatacaaaactatttattttttggggaatcaacgcggtcagcacaaatatgcaccaaattacgatcgcccaaaaagcgcgaaaacaaggtgccaaaattgtcgtgatcgatgtgcataaaaatcaaacaggacgtctcgcagattggtttattccgataaagccgggaaccgacagtgcacttgctcttggcatcatgcacattttatttaaagaaaaccttcatgatgaagcatttctgtctgagtacacggttggctatgaagagctccgtgaacacgtgaaacaatatgatcctaaaaaggtatcgacgatcaccggtgtcagtaccgaagatatttaccgactggcaaaaatgtacggggaaacctccccttcttttatcagaatcggaaacggaccccagcatcacgataacggcgggatgattgtcaggacgattgcctgtcttccggcgatcaccggccaatggctgcacacagggggcggcgcaattaagcataacagcggaattttagaatataatacaaatgccttgcagcggcccgacttattgaaagggcgcaccccgaggtcgtttaatatgaatcagcttggcaaggtgcttttggaaacagacccgccgattcgctctctatttatttacggaacgaaccctgccgtcgtcgcacccgaagcaaacaaagtcagacagggcttgctgcgggaagacttgtttactgtggttcatgatttgtttttaacggaaacggctgcatatgcggacattgtactgcctgcaacatccgcttttgaaaatactgatttttacacctcctactggcaccattacattcagcttcagcagccggtgattgagagatatggggaaagcaagtctaacactgaggtgttccgattactggctgaagccatgggattcacagaccaggagcttaaagattcagatgaagtattaatccgccaggcgcttgaccatccagataatccgcatttggcagagattgattacgatgcactcactaagcattcatttatgaaagcaaaacgcgaaaagccgctgtttccgggcgaacttccaacgccaagcggaaaaatagaattatattcagaaaaaatgaaacaagacggcttcccggctttaccgacatatacacctcttgtaaccgataatgaacatccgtttatgtatgttccggggccaaaccataatttcttaaactcaacattttccaataatgaaaaacacatcaagcttgaaaagacgccaaagctctttatcaacacaaaagatgctgaagaacacggaatcgttgatggggcacctgtacgaatttggaacagccggggagaatgcgagctgaccgctgcagttggagaacaagtgctgccaggtgtcgttgtcagccaaggattatgggcggatgaacaaggaaaaaaacagcttgtaaacgcgctaaccccagacagattgtccgatatgggcggcggcgccacctttttttcaggacgcgtgcagattgaaaaagcataaacgaaaaaaccgcccagaacatgttctggcggtttttttttggttgataatgaaacccggagtatgccaagcccgtataacataacatcgacataatggaggcatgcatatggacgtttttttaggaatcggtattgctttggctggctattttatcggtgaaggcttaaagcagaggaaccaaaccaaaggtaatgaacaaaatgatatcttcctaataaaagaacgggatatttacttttacattggactttttttaggaataacaacgactgaagcaaaacagttagctggagacatggcagacctgccttacatcgaaataaacggaaaaaaatatgtccagaaacatatgttaaaagattggacattcacattagttgaaaaacatcagggtgaataaaacaaatctgaggagagcgagattcattgtcacgacgctctcctctgtttagctgtatggattgaccgccaccaaaactttgttctataagcgctgataaaacgataaaccaccatctatgttctttcctcaaacaactcaagatgcccgttccacaacaatagtttttatattcctttgatgacgtgatgttcttgatgaacgtatgtatcgtaaaacacttagaaaacctattcggtttgaatgtgtgctctcattatgcccccatactgcgcctttatccgcggaggatttttttaaaaaaatatgaaacctaaagcttttagatcctgaatttttattgaacctccatatttctccgattggtaaaaattagcctatacaccggaagctgtacgtttataaaggatcagagaatcccataaccagtaaatcactgcagccgcaatacttaacatataataaaagtacgattgcaatgtccatgctattgacgcaggttcattgataacaaaaaacaggaaagctgcgataaaagcaaccacactgtaaatcaataggtacatgacattgaatgttctcgcttttttctgcaacttcatttggagcggaacagcaaaaaggccatacaccacaaaaccgtataataaagcaattgctgccgtaaacaatgcaattatcatatcgccatacataacgaaagaataaaaccctaataacaaaccaaatgtaaggctggatagccctaatgtcattaaataatatgatgcgatttttttcattttttcaccccccttgtttgatttattcacagtgctgttagtataaattcacaacctttgtattaacaatgcgatgataaaaggtttcaaaaatacgactttttattaaataatacgactggcatgaaaatgcctctcctgattagccaaagcgcgaatgaaaaaaagtgaatgaatacctgatcaacagacaaaataagaagagttgatattcaacacttttcgtaaaggagtgaaaccaatgagtaagaaaggtattcaaaattcaagtattgaacaaataagaaatgaccatgagactgaaacagcttttaaagcagatgatcctaaaaaacacggttccgatcctaaaagaacgaaataagttcttacccccactaaaatatcaataatctggaggaagtaaagtgactcaaaaaaacggtgcagacagacctgatgattataaaagattttcttcattagacaaggaatatgattttcagcaatctatacgcagcaatactgagacagaaagtgtaaacactgaaacacaaactcataacaaagaaaacaaaaatgacacaacagatgttgccgggaaatactttgagccctcagattataaaggaagcacgcaattagaaaaaggattggctgaaactcatgaacaggtgagcgatgactattttgaagggacaatcgatcaaaatttggactagccatacaaacggagctacttaaaagaagtcagttagctccgtttgtagaaacaaccacagtaaaagtagccaacccccaccgaataagatgggggttgcacgtaagtagcctgtttaatagttaaaacgattaatgacggtttgaagttcttccgccaattgggatagagattctgcagcataggagatttcctccattgaatgaagctgctcctgtgaagattttgcaaccgcttctgtatttgctgacgtttcttttgtaccagcagccaatgtatgaactgtgtgctgaatcacttcaacgcctgatgtaagctgttgagttgccgctgcgacttcttgtatttgagaagtgacctgttccacgaggttcagtatttcattgaaatttcctgttgcctcttgagaaagaacaatacctgagctcacattttcttgaacaaccttaatattatttaccgtttctagcgattcattttggatggtcgctaccaccgattggatgtggtttgcagatttatttgtttcatccgccaacttccgaacttcttctgccaccacagcaaatccttttccttgctctccggctctggccgcctcgatcgctgcatttagtgccaacaaatttgtctgctctgaaatcgtcgtgataagcgaagagatatcgctgatttctgctgtgctcgctaccaatgtctgcaatccattgccggctgaatctacagatttatctatgaatttcatctgatctaacatcttgttgacggacttagagcctatttcagccttgtctctcatcgaagaagaaagatccgctatgttccctgtatttgaagcaactgatgatatactgtctaataattcagtgatggattctgcgctcttttctgtcattgagctttgcttcacattgctgtcggcagccatctgcatggctcgggaaatatgttcagatgttgatttcgattcttccgcgcttgccgataattcttcggaggaagcggcgacttgttcagatgagctgctgatctgcttcacaatttgagttaatgaatgagtaaaagaattaaacgattgggcaagctgaccaaattcatctttatttttcacaatgacttttttggttaaatcagcgtcgccatgagcaatttcctctagctgcttatttatgcttcttagtggcaccataatggactttaacagcattatgcttagaacaatgcctaatattactgatatccctgtgacaatgataatgagcgattgactcattttcccattgccctgtatttcatcctttagatcctctacctcttgatccaggcgatcagacagcttattgacagccggatctacgacttcttttcttaatgttctttcttctccaaaatggatggtttctgcttttttaggatttgaagagtaggctgttactacctgctgattcaaagctctatactgagtaaaacttgtcttaatgtcttcaatattggattgatacttctcttcatcaatcaagtcattaacccggtcaaggctctttaagacatcgtctgctttttccttcataccctcgtcgtattctttgtctccggtaatcaagaagcctctttcatcatttgataacccggtcaattcatattggatgtgttttatctctttttggaattccattttgtctttaagttcttcattctttttcacagtagaagaaatcataaatactgaggagcctccaattccaataattgaaacaactaatattgatataatccccagcaattttgttttcactttcatgtgtcgttttccctttccgcacaatgtaatggctgaaataaaatatgttcaagcgcgtttgaatccaattcgcttacgctcatgtccataatatcgacacgtgttatcaagttttatagtgctattttcatatgaataagctaattctttacggctctaaatcttcagaaaggcttcacgaaaaattgactgtcttttgtcgtataagtcactcttattctcattttctattaggcatacaaaaaaggcttttcccacctcaaattggctgaaccggctgttttctcgaaaatataatacaatacgcagcataatatgaaggagcgaaacttaaatggggatcatcaatggtaaagaattcattgaccgattgaataaactagaaaacgaaatatggtatgatggcgaaaaaataaagggtaacatttctgagcatcctgcatttaaaggaataatcaaaacaaaaagctcactttatgaattgcaaacaaaggatgagttaatacatgaaatgacttattgccttcctggagatcataatcgaatcggcctttcctatctccagcctaaaaccaaaaatgatttgaaaaaaagaaggaccatgattgaacattgggctagacatactcatggaatgatggggagaagtccggattacatgaatacggttatgatgagctttgcttcgtcagcggagcttctaaaagataaagagaattgctttcctgaacatatactagatatgtatgaacaagctgctaagcatgacctttcctttacccatacattcattactccgcaagtgaaccggtcacagtcctattttgggctaagtgaaaaaccgatatctgctaaagtcattgatagaaccgaaaaaggtttaatgattcatggcgcacgactgcttgcaacacaaggcgggttgaccgatgaaatcttggttttttcagcgcctaaatttttctttgaaacagatgaagcttatgctttttcaatcccttctaatacaaaaggcgtaaaattcatcacaagagaatcatttgtattaagcgactcttcctttaatcatcccttaagctcaaggtatgaagaaatggattcaattgtggtttttgatcatgtgttagtgccgtggaatcgtgtgtttttttacgataatgtggaagcagctaaagattttatgacaaaaagctcttttcatgcctttacctttcaccaggttgtcattaggcaaatgataaaaattgaatttctattaggtgttgcacagcttcttgtcgacaccattaatgtttccgaatatcagcacatccaagaaaagctctcagaaatcattgtgggattggaaacaatcaaagccctcattgacaaatcggaaaatgatgctcagttagatgaattcggctatatgcgcccctgtttaattcctcttcaagtcatcagtacgatcattcctaagctatatcctcgatttactgaaatcatacaattaattggagctagcggaatggtgacactgcctaccgaaaatgcatttgactcagagatacgggaagatcttgaccaatatcttcaagcaaccaatacaaatgctgaagaacgtgtgaaaattttccgtttggcatgggatttaacaatgagttcattcggaactagacaaactcactacgaaagatattttttcggagatcctattcggatttcaagcaggctgtataccagttatccaaagcaggagcagttgaacatgattaaaacatttttacatgcagatacagaacattgaaaaaacagcgggaaaagatccgctgtttcgtattttttattcaggaaactgaacatggcccggtactgtataggctttggacgttccgctttcaggcagctttggaatggtgtctttcacaacttttccgcggatgtcagtcattctgactttgagagagccagtacctaaattcgtactcacaaaatggttatagtccattttctccatgttgatccacttaccatccttttcatattccattttcataacaggatacttgtgatttctgacttggattgctgcccaccacctgctgctgccttctttgatccggtacgtgaaattgccggtgattggggctttgacaacacgccatttaatattgatttttccgtctttcatattgccgattttacggaaggcattaggtgacagatcaagagctccccgagcgccttcgggataaagatcagtaacatatacggttgttttcccttttggcccttcaacttccaaataagagccggcaagtgccgcttttactcctccgtaattgagatccgccggatttattgcagtaatctccatatcggaaggaatgggatccagcaggaaagctcctcctgaataacctgaccctgtatacgttgcataaccttcatgcaggtcgtcatatgctgccgaagcttgcggggaaaaacagaagatcgtcaacaaaaccataccaacaaatgcactcatgatctttttcatatttggtcctcctcaaaccagactccaaatgagaatcattatcattataagactcaatccatctggtttgaaagaggaaatagattcatagttgattttaaggcaaattcactatcattcatatatcaaatgtaggtacttatgaaaaagccaatacaaatgaacgaatgtgcacttcagccgaatgtcttatttttccctctcaaaattcgcatttcaataacgaaatgaaacaggctgttggcctgataacagctatacaggaaaagctatttttccccgctcagtttcaacttagctgtcatcatgatgccaaagatcagcacaatcggaacccaaataatgaagtgataaaaatcaggctcagccagagcaacaataatagcccctacacaatacaaaataatagccagtgctcttaacacagtatctcttaagaaagtcttcttttgcttcttaaaaaacaaacggccggatatatcctctaaaagagaagccaaagtgccggtcaacacagttgaagaaatacctgcaatccccagtttttttgctgctgtagtttgaatccccatagaaatgctcatgagtataattagaatgtgcacaggaacaaatgcccggtaaaaagaaagacaagcaaagacaaacaaaatgaatgcttcaagtgcgagggcttttgtcacagcagaaggccaaagggtattttccgcctttccgaccatcaatgtagcaatgatcacgccgcatataaatccgattagcgcagtcaaggaattaaaaacagtgacttgaatggatttgccgatagctaaccccaataatacaatgtttccagtcatattagctgtgaacacatgtcccaggcttaaatacccgattacatccacgattccagctgttaaacataaaagtgatagcaaggtgtttcgataagctgctgcagtcaacggtgtatcaatcctttcttctatttcaattgttagtatgtcttttggcgcaatctctattttttaagtaacccaacattaattaggaagatagaacctatcattcctttccattaactgtaataataatccccgcaaggaaatgattaaaattgaaaggaagcatattgtgatgaaacgactttgtttatggttcaccgtctttagcttgtttttggttctcttgcctggaaaagcattaggtgcagtcgattttccgaatacctcaacaaatggccttttaggttttgccggaaatgccaaaaatgaaaaaggcatctctaaaacgggcacaacgggtggaaaaaacgggcagattgtttacattcaaagcgtaaatgatttaaaaacccatctaggaggatccactccgaaaattttagtgcttcaaaatgatctttccgcatctgcgaaaacaacagttaccattggctcaaataaaacactcgtgggctcttacgcgaaaaaaacgctgaaaaatatttatttaacaacttcatcagcttctggaaatgtcatttttcaaaatttaacgtttgaacacagtccgcagattaacggaaataatgatatccagctttatttagattccggtatgaactattggattgatcacgtcacattctcaggtcatagctataatgcaagcggaagcgatttggacaaactcgtgtatatcggaaaatccgcagattatatcacgatcagcaactcaaaatttgcgaatcataaatacggtttgattttaggatacccggatgattctcagcatcaatatgacggctacccccacatgacaatcgccaataattattttgagaacttgtatgttagaggcccaggtctgatgagatacggttactttcatgttaaaaacaattacagcaataattttaaccaggcgattacaattgctacaaaagcaaaaatatattccgaatataattactttgggaaaggcagtgaaaaaggcggcatccttgacgacaagggcactggttatttcaaagacataggcagctatccatcactcaacaagcaaacctctccgctgacttcttggaatcccgggtcaaactatagctatcgtgtccaaacgccggaatatacaaaagaatttgtcacgaaatatgccggatcacaaagtacaactctggtatttggctactgatataaaagaggccctgcgttaaaaacgctgtgcctctttttatacttataggctatttttaagcgatccttgtaactccatcaagatccagcgtcggtcaaaccaaaaagcatatgtttttttccgcaataacttcttaaatggctttcttattataccagtttatcgcaagtaaaaagaaatcattgttctggtcctgtattaaatcaacgttcgtcccacacactattcaaaaacccctaaaaaggatgatggatatgtgcggcaggtttactttgtactctgcatttgatgatattattgaccagtttgacatcgatcaattttttcctaaaggtgaataccagccaagctataatgtcgcaccatcacaaaacatccttgcaatcatcaatgatggatcaaataatcgcttaggcaagcttagatggggacttattccaccttgggcaaaagatgaaaagatcggttataaaatgattaatgctcgagccgaaaccattaccgagaaaccggcctttcgaagaccgcttgtcagcaaacgctgcatcataccagcagacagtttttatgaatggaaacggcttgattccaaaaccaaaatcccaatgcggatcaaattgaaatcatctgctctttttgcgtttgctggcttatatgaaaagtggagcacacatcaaggataccctctttatacctgcaccatcataacaactgagcctaatgagttcatgaaagatatacacgaccgaatgccggttatattggcccatgatcatgaaaaggagtggcttaacccccaaaatacaagccctgattatctgcaaagtttgctgctgccttatgatgctgatgacatggaagcataccaggtttcatcattagtaaattcacctaaaaataattcagctgagcttcttgatgcagaaaatcatatgtagtgattgaaattctctagcaagaacttgtcaatagctttgttccttaggtgccaatccctctagtaattatgaatatttagtacatagatcaattagttttcgatatcagttcgaaataattttattatgtaaacttaaataagcaatgttatccctttcatataaaatagtttacatttttataaagtcgcttcacctttctattttgtcagcaaaaaaactgaaccacattaaacttatgaaacctgccgcacctgtgattgcaaatatgatataagcccatagaggtaaatccatacactttccatcctaagaattaaatgaaatttctttcatcttacatgaaggtcttctttcttttgtttatccagtgtaatacttaataatatgttgatgaatgcagctggaaaatatataaatcccactccaagaatgcctagtatcgtacttaaacttactatgtaattctttgtcatcgtttgactgtcaatcaatattagaagtgaaatcaatccagctaaaacacctataaaccaagcatcgccaacagcataagaatcatccagcatccctaaacatcgccccaatatagagctcccaatggcagtcaaactggataaaaatatgagtgctttcatttcttctcctcctttaaagccaatcaaactggtagaaatcggccattgaattcccattatcgaatggttatcatttccacattaacattttaaagctcattacaatacgattcaagcagaaaaaccctacataacgtatatatagggatttaataaaacacaggccaaaattcagctctatctactttaaaaagatatgaagggcagctgtgtgatctgttacgtctttacgtaccgagatatttcacaacaggcactttcttcttgcgcagagaatcaagcatgactgatccagcattcaagttgctttgtactaattctttaggcgtcaatgccatccactgattgagtgacacatctgcatagcggttacttttgaacatttctaaaaaccataatgtttctgtaccagtgttttgtatatagtgtccggcattagaaggcacgtatccaacgtcgcctgctctataatcaaatgtgcgggcagtcccatttccgataaataccgtcattcgtccctgtcctgttagataatattgccactcatcgctattgggatgccaatgaagctctctcatcgcgccaggctcaatctgaacaagtgcagcggctatcgtttttgaaattgggaagttagaagaatccacaattcgtacactcccccctggcatttgaattgggggttgatttaacagctcgtgtttaaaggtcatggggacttttccatatggtgactgaatgtcttcactggcgactgatcccggcacattcccttggtagatatagacttgctcagacggaagagagttgaaagcattctccgggacaccgaaatttgcagacagaacatcttttggtgtgtgtgcaagccaatctgaaatggttaacgttgaaaactcagaaaagttcccatcatcgaaaacgagcagaaactcgcagtgttccaatccctgtatggaatgcggaattcctgccgggaagtaccaaaggtcgccgggaccaacatcagcaatgaaatttcgtccgtcttggtcaacagcggtgatacgtgcccgtcccaaaagcatataagcccactccgcttgcttatgccaatgaagctcgcggacgcctcccgcagttaagctcatgtttacacctgcaatcgcagtcgaaatcggaagctgtcttacggtgatttctcttgaccagccgccgtgatctaatttcatgggagcgtctgagaatgaaaatctcaagttaggaatcataccctcatctgtaacaggcggaacaaatatattcggattttgaatatcccgtattatatttcgcgggcctgtatcaatagctccagctccatcacttcgaataggctgcggcacgtttctgtcttcatgattgattggttgttgttccaacagcatgcacctcgttttagaaatgaacaagattttatttcagcctatgcagaatcttagattgctgtgcctaggaatccgcaaataaaaaagtgaccaccaatgtgatcacaaatacatcaaataaactattttttataccatggcttcttatgtaatttgattgcttctgtctgttttttctggcctgtcctccactccacttttactaatacatcatgtcctatcacttcatcttcaggcatataatcaaaggtggaaatatggtcctccatgcgtcccccacccggcatttcatcacctgtgtactctgataagtcgtactcatctacgttatcatcttgatacttttcgccatctacatacagagtaattctttcaacaacagtccacttttcttccttcttactcccctgccaatatagatttagaaaataattgggtccaattgaagttttgtctgatttttcaaggttagacatccacagtccgcttttcccgctgccctcatatttcactttgtttcctgacaccattacaaataatgtgatgatgcagatgatcaagaatccagcaatgatcaatagccatttcttaatattgttcttttttctcatgtttttcctcactttcctaactttttagtaggaaaatacgatcaaaatgttaccgaaaagaaaataaaaaagggctaatgatctaacagatgactgtctaaacttttgacttaaattaaagtgctctctaaagacaagattaaaacgtataacagctcttaaatgcattttttgtttcattgagtcaagaaccttaaaatggctttttattattaaaaatcaagctagtgtattaagtaacttttcaaatttatttatactcatgatctcgtgagtcacaaatcttccatcaaaaaaaacgctaaaagttgtccaaatagctggtgacttttgtgcctcttctttcgatgataactgaattgactgaaattgaacccctttcttttcagtcaattcccgcaaatcatttatcatgcccactgcaaacggacactgagctgtatagtatatcgtaatccccttttcattgatagaatcacttttcacctggctcttaaatgcaggagaagctgcaaggccattccaagtcaaagccattaattgaaaataaggggcagcttcatcttgtagagtaaaccccatatgctcaaagaaatgcttatcacttaaatagggcagttttttcttgcctgcgatatggataatgccatccatgccgcacgctttcgcatctgctatacatttgtccaacaatcgtttcgcatgaccgttatttttatatctgccagacacccacagacaattaatgtacataaaattaggcgcattgataggcacccatgcctcattcgcaggtaggtattcaataaagacttttgcccgttcatgtaagcgatagaacaccaatccttcatccattcgagctttgagccatctcttcttttcattaactgcatgctcatattgtttcgtgcctaatgcacagcaaatatgattgtcttcaatattgtcctttgtgatttcaatgtagcacatctcctcttttccccctttaacataattacatggaattcaacttcacactttacatgcctaatagaataaatacccgttccaacttaaatactttttcttttccattttgtcaattaactgtaaaactcttcttttattcagatattatcttgattcctatatcacccatttcaaatccaaagtgtgttcatctttgaggattagatgcactgcttatgctataaatacagtacacgaagttttttatttgaagtaatatttgttacgggacagcaatagtaaataagtgataaaaggggaattaaacttggtggaaaaatgttattcttgtttaatttgcagatacaaaggattatttcaaaatcctttgtataaaggcgattatcaaaaaacgtttgacatttgtccatgttgcggttttgaatttggctacagtgaggatcatgatgtgaggttaggttttattgtaactcctgatcatttaattgaggctgcatttcaattgtatcgcaaacaatggattgagagcgggatggtaattgctcatccggaagatattccagaagaattgaaaaatggcaattgcttaaaatttgaagttttgttgaaacaattgaaaaaactaaatcttgacatagaaaattttgaaattagcggtttttaatgatgaaacaggttgcacttgtttaggtttcactgtcattatcagtaaaatgttaagttgaaatgcgcagtcagtcacaaagtctctattcgtattcaataaagactttgtgatcatcgacaaacatttcactcccatcggataaagtatccaaaaggcctcctctggttcttctctatagtcattaatcacagtcactttgacatttgactcagctatgattggttttccaacaatttttcgttttttcctcaggcaaagtaagagatcgaatcatcaaagccattccatctttactgtctaattaatgccatcttcagtgaatttaaaggtctgttttaaattgcgtccttcttgccccttctgtgtccaaattataacaacctctaattcagaggccttatctgccagcataaaatgattgaacttcagcggtgagccatcatttaaactttcagctaacattttagaatcttcttttggtttgacacaattttcatcgggacatccaaaaagcgaaaaccttgtgattgaattagggtcatttctatacaattgcacatccactgtagctgctttttcccctatatttttgacttccaaggaatatacttgatattctcctttttgaggtctcgtaaattcctttacattttttgcttcacttacttttactgaccactgttctgttttttgtgtaataggcaacaccgtaaaagtcagggcatgcgcttttgattggcaaaacgtaaatccaactgctgtaaaaacaattacagaaaataatacccttttcacttcatttatccctccttcctttcactggccgctccttaaagaattgattttgagcaatctacaagctctcttaaccaaaaccttacctgaggttttgtctttactgctctgcatttatttctttcggtatccgagaaggagctttggggatttttctcaatctgctgttaatcacatcagaagagtatagcgtaataatcatacttctcccatacctttttgcccgaattaagattggttggttatattggttttgaaagcgaaagtcaggacctccccagcttaccgtcgcatcccgtccgggcggtacatatggtacacttctagtatgagaatagcgctgaacgatctgcagtcctgcacgatctactgcattaaatagagttgaggacacctgacaaattcctcctcctacaccttcagacaactctccttttacaataatgggtgcacttttatatcctttgttccgagttctcattcccacaacttggttaaacgaaaacgtctcattagggaaaacaacgtgattgtcgattgcttttgcagaaagagaaatattgtgtgaacggcttttattgcttgagttaaaatacgtcacgtactgaccaagctgctgcgtactgatgtgagctagcagctcgctgtcaactttcggataaatgttcatttccggcacttctatcttggagggaccttgcccataaaaatacgcataaaacttttccataaacgcctgttgatacagtttgtagccaaccctgcccgggacgatgcttccatgatcgttaaggacagcatttatcggctcacggtacactttctgatcaagctgtttgatgaatttactgtatttttcatagtcaaccattggagtgccgggaagaggcattgtaaagtcttcacggttaacagtggcaatcgtccgtccttgctgtgtgaccgttaaactgtcctgcggctcactcggctgagccaataaaaaaagaccagtgatcaaaatttgtatcataagtcggtttacctcccaatcattagtatgaacagccgcttatcctttgatgtatttcttcccatcgtttgtttgaatctttagacgttgataaaaaccttcataaaagagcttagctttatgttcacaccgatccctgagctcactgaggcacacggttcattcagtcggcaagtttgaagtagttcagcatctcccagtgatgagggatgcttttttgtcttgtcaaaaatgaaaagggtctcctataacaacaaaaaatcaatccatttcaatatttttttattgagaaacgataaattttttgttacattcaattagacaacaaataaatgaggtgcttgttatgaatcgaatgtcgacaatttttttaaagatagctttggttcttattggaattccaattcttgctttatgcatttttttagtgcctaaggtagccaactattcagcagaattatttccaaatatcgcttatataaaatatctcgttttcatctatttgtatgtaacggcgatacctttttactttgctctttatcaagcgttcaaacttttaagctatattgacaaaaacaaagctttctcgggtttgtctgtaagagctttgaagaatataaaatattgcgcagtcactatcagtatcttttacgcagcaggcatgcctgtcttttatctgatggccgagatagacgacgccccgggtatcattgtgatcggattggttattatttttgcttcaatggtgattgcggtctttgctgctgttcttcaaaaactgttaaaagaagcgattgatataaaatcagaaaatgacttaacggtctgaggtgatgacatggcgattattatcaacattgatgtgatgcttgctaagaggaaaatgagcgtaacagagctttcagagagagttggcatcaccatggctaatctttcgatattaaaaaacggaaaagcaaaggctattcgattatcaactttagaagcgatttgcaaggctttagaatgtcagcccggggatatattggaataccgaagtgatgaagacacaggattcgtaaagaaaaaatatgaaggatcaacagaaaaataaagtgattggcggtgagcttatggacataaacttatatccatctagctgctatactaagcgtccctttcatacacgaagaacacaactatggaggaggcatacatcatgagagccataaaacaaatcgttcattttggctgggaacaagccctttcatgtttgtttcctgccgttatttttgcctctttggctattacgcaaatcatcccactgcccttcttgccgcggtatgactggctgctcattatctgcgttctcatgcaattgtggatggtgcgttccggtcttgagacacgggatgaattaaaagtgatcacattattccaccttattgggcttgctctggaactttttaaagtccatatgggctcctggtcttatccagaagaaggatactccaaaatatttggagtacctttgtatagcggctttatgtacgcaagtgtagccagttatttgtgccaggcatggagaaggcttaatgttgaactggttaagtggccgcctttttttgcagttgttccgcttgccacagcgatttatttgaattttttcacccaccatttttctatagactttcgatggtggttatctgggcttgtcatcattgtcttttggcaaacatgggttacatacgaggtgaatggagctcgttaccgtatgccgctcgcactttcttttgtactcatcggattttttatatggatagcggaaaatatcgctacgttttttggagcttggaaatatccaaaccaaatcgatacatggagtctcgtacaccttggaaaggtaagttcatggctcttgctagtgattgttagctttcttatagtagcatcattaaaacaagttaaggagcagagtcccacaaaggcagagatggatgaatctttttcttagcatacaaggtcccaaatagagtgaaaagcaacgttcaaatggttgcttttttcttttatgtaactctgccggtgagtattcatcttcttcaaatttcatcgcaccacgataactgattcagattacaactgctttcaacacattgataaactcatgcgccgccggcgttatctcttcaaatgaatgtacgatgacgccaatatcgcgtgtgaccctaggaaagatgtcctttttaatcaattgatgcgggacggatgaaagtgtaaagtttgaaatgatgccgatacccaagttatttttgaccatattaatcaaggtttcggcattttgcacagttaagttttcctttaattcgatgttgtattgcgaaaatgcgtttgacatcgcgatttcatgaccgcctttacaaaaaatgaggtcatcttgatatgtttcaaggtcgacatgcttttcaagttttaattcgtcacgctgcggcgggatgacggccaccatatagtcgttacacaatagctgattttcaaacggttcaaatggagatgctgcgattccgatatcaaccgtccgatcctcaacccatccttttatttggtcagaggttccttcgatcaattctatgcggatcagcgggtagtttgatctgaatgcagcaatcgcctgtggcatgatatttgttgaaactgcaggaaatgaaccgattttcaccttcccgtttaacagcttgttttcccggttggctacttgatatattttgctttcaattcccttcatttgcctcgcaagcagcaatatttcttttccgatgtcagtcagcattaaaccatgatgtttatccctgatcaataatttgagctgcagtgagctctccaggttttttatcgctttgcttaccgccggctgagagatgaacaattcttttgccgcttctgtaatattcaatttctccccgacttttacaaatatgtgaagatggttcatattcataaccatttggttatacccccaataataaaaatgtatttcagttatacataaatgtaacatatgatagaaaccagcacgatatttaaacaagaaaggcggcttcattatggtaaaagttatgctgggaatcatatctgtcacacttatttggggttatacttgggttgcgatgaaagtaggaattcatgacatccccccgcttttattttcgggtttgcgcctgttcatcggagcagttcctttatttctcattctcttcatccaaagaaaaaagctttcaataaaaaaagaacatctcaaaagctatatcatcatgagcctgttgatggggctgggctatatggggattttgacgtatggaatgcagtttgtcgattcagggaaaacctctgttttggtatatacaatgcctatatttgttacggtgatcagccatttttcattaaacgagaaaatgaatgtgtatagaacgatgggactggtctgtggcctcttcggactgttatttatatttggaaaggaaatgctcaatatcgaacaaagcgctttatttggggagctgtgcgtacttgcggcagcgcttagctggggaatcgcgaatgtgttcagcaagctacaattcaagcatatcgatattattcacatgaatgcctggcaccttatgatgggagccgtcatgttattggtgttttcctttatatttgagccggtcccttcagccgagtggacatatcaggcggtgtggtcattgctgtttaatggcttgctttccaccggctttacctttgtcgtatggttttgggtgctcaatcaaatccaagcgtcaaaagcatccatggcattaatgtttgttcccgtattagccctattctttggatggctgcaattgcacgaacagatcaccatcaatattatcctcggcgcactgctgatatgctgcgggatttttatgaatacatttacattttcacgacggaaagtgtgaatgatatacatttcccctgtcatttgggcttcatgtgacaggagacgactattacgagaaagtcttctagaatcctgacgacagcctattaaacaatgaaaaaagctaatgtctgcatgtagacattagcttggctggcgtttaggctggtgagaatccagatacttttttattaccattctggctgatcaaactgaaaaccgtatagaccttttactttaacatctccgcaatctggatcttttgtcaaaatcaaataatgagtcttataaggcatcgtctcaactcgatcagttgcactcaaatcaaaatgatcccctgagaagtttttttcactaacggttatttcatatcctgacaaagtcattcgcatgattcttgcgttaattgtacatccttcagtatcgaaaatggtgaatctgtacccaaagtgagatgtccaatggtttgaatttaggtcatcagacttcataaaccatttttcattttctgtcattgtaaaactcactttctcctcatctttcacgataacagccgaagcttcccctacatggatagtcaaagccaaaagaaatgtaaaagctaacatcaacatctttttcaaaagagttcctcccgatatctttttacttcaatttattggaagggtcttttctgatcaagacagtcttctccaaatgaatctttagcatcatgaaatgagccttaataagaacagttttaacccaaatcaaactctattcgaaataaggcttaccaatctatattctttttaaaagtttctgcatttctttatatagctcctagacacatataaaaaatgctcccataagttcaggagcactacaaaaaactgctaaagtgttttctatcgatttattgtattcattagctcaaagaagtattcaggcttataagtcttattcagcttataccatgaacgcaatgtatctggtgcaaatacttctaattttttcaatacttctaccgcaaattccagaggagcaattcctgatgcagtaaccaaattttcatcagatactgcaggttccttttcatatagtgtttctcctttgtaattagggcagaccattttcatatactctaggtcattgcttgtgtgctttctcgaatttaagtatccttcattcgcgaggcccaaggttgcaccacaaatcgcagcaatagtcgtgccaagctttaaagcgtcgccaacttttttcaagatcggctgatgaatatcttctccccaagtgtttcctccgggtaaaatgataagatcttgactctcaagagtacactcatcaagagaaatatctggttttatgcttaatccgcccaacgtagttatcatttctttattagcccctactgtaactacttttaaagatgctgcatcctgtttaaaatatctccctgagtttagttcagcaattaaatatccatattcccagtctgacattgtgtgaaatacgtagagataaacttttctcgtttgcatccaataacactccaatcacaattgataaagctttctaatagatgactttgctgacagccattgtcagcatatgtattctgatttgcctattcttatataataccatgtaggtgggcaattgcccttgttctcccaacttattaaaaatataagataaattgattctatgtttactagcgcaaaggggtttgttacactaactgtcatgggaaacatttcaaaggtaatataaaatcatttgaatgaggaggcctgatgaagttgaaaaataaagcgtcaataaaattcggaatatgtgttgggcttttatgtttaagcattactggtttcacacctttttacagctcaacacatgccgaagcaaaatccatagaagacacaaacatggcaagctgtataacgaataaaaaatttgttcaacttgagaaaaaatttgatgccaggcttggtgtttatgccattgatacaggttcaaacaagacaatcgcctatcggtcgaatgagcgatttgcttacgcatcaacctataaagttctagccgcagctgctgtcctgaagaaaaactcaattgaaaaacttaatgaagtcatccactacagcaaggacgatcttgttacatattctccaatcacagagaaacacctagatacaggcatgagcctaaatgaaatctcggaagcggctatccgttacagcgataataccgctgggaacatcttgttgcaacagcttggcggccctaaaggttttgaaaagtcactgaaacagattggggatcatgtaacgaaagctaaacgattcgagacggatctaaactctgcgattcctggtgatattcgtgacaccagcaccgcaaaagcactagcaaccgatcttaaagctttcactttagataacacgctcacgactgacaaacgcacgatcttaaccgattggatgcgaggcaatgctactggtgacgaactgattcgggcaggcgctccaataggatgggaagtcggcgataaatctggagccggaagttacgggacacgaaacgacattgctatcgtttggccgcctaacagagctcctattgttttggcaattctgtcaaaccgctttacgaaagatactaattatgataatgctcttatcgctgaggctgcaaaagtcgtccttaacgatctcaaataatatgtttagccttttgccacaaaggaaaagacattacttttttaactcctaccgttcattttttgatgaacggttctttcataagacctctagaatcatatatttaaacaccacaaaattaaacgttattatatttaacggcaagttttcattttatggaacaagtaaagtttgaatctgacaagaattaaggctaagcaccctaaaatccgttttctttccttccaagaatatactccttagtgcaagccattataaagaagtgaacatacaatgcagacaactcccttaagtctcttattctgtgaccaatttgtaatactcatgaatatccggactcacttccaatatttcgtctcgaagacactaacatatcaaaccacttgaattaacataactgaacttgatattggtcactggcagtttcaatgcaatagaacaacatttgttgactcagaggttatctatatgagaattcaacaatttttttataataattcatatttttgtatcgttgcacttggtggatttgactcttttaatgtatggaaccacacttttattttttcacctcttttgagatcatctgtgttatcaatctcacttaatcctacaattactatgttatttttaaacttgttcataagttgtccttcagaaagatcgtaatcttcttttactggagcttttgtatcggtaatgagaattgccctttcattgtctttaagcacgacatagcctactaggctctgcatctttgtttcttctccgtgttgttcatttttgcagcctgcaaggaaaataatgagcactatcaagcttactccgattttaggcaactttctccctcccgtaatgttaaacaatctcactccataactacatatcaataaactgtagtgtaaatctatccagaaacttcttcattttctcatattgaatcttttacaagctgttaatacacagactaaatcgggtaaaaattcgtagaggtgatttctttgaatgatgatcattaagtaactcattactcttcatttattttttcaacaatcatggtattggcggtcgccatctttccacaatacacttcttggtttgtaacagttttcttcttgagttttgcacttatctatacattccaaatacatcaaacaagttcttcaaaagcaatatcttatatttcgtattttttattcattgtttcattgacttacactttagttaatatgtaatagtaatcctccctttgtgggaggattatttgtttaagcttatttctaggctgcttttgggccacctctatctataatgataaaactatctgaaccatttttttcttccgatctttgtcttcgtaaatagcaacattttggcgtgtcattaatgtaataccggccattttaaactctttttgatctttaaaataaacaacagggacattcaccaaacggatctacttctttttgttctttctcaaatgtttgtatgtggttgtcttcgaaccatacccttactcttattccgctaaaatcgagatttttactttttatgatccattattctctttcaaaataacttccaactacaacataatatatgtataaattgtaaatggagttgatgtaattgaagattaggaaaatcttattgagttctgctttatcctttggcatgctcatatccacggttcccgcattggctgctggcacttcgtctgaggttgcagtaaaaagtggtgaatatgattatgacactatataccgcattagtcctcttccaatggacttccagccaacaatagaatacaacggttatacttatacgcttacacgacattattttgattactcaatcgggttttacacggctatttatacaaaagttgtttaaatttataaaggagctttttagctcctttttctcttgttttaagcacaaatacaagtttaaatgctggtaataaaaaattcactttaaagaagcgccgcccgcaaaatgcggcttttgcacactacgccaattttatatagaaaagccagacctcctccaagaggttccagcttttcttaatgtgctatcgatcttcgttagttcaacgggaacttaatcattcggtacaaatgcagcctcccacttctagttagggctgatggcggaatatctgatggctctctacacatcagacattataagatttcaatgtagccttctgtaccatgaacgcgaattcgttgcccatcttttatcagcttggcagcattttcaacgccaacaactgcaggtaagccatattcacgggctataacagctccatgggtcatcagtcccccaacttcggtgactaggccttttatggatacaaacaatggtgtccagcttggatcggtaaaggaggtaactaatatatctccatcttctaaatcagcatcttccatgtttaaaatgacacgcgctcgcccctctatcactccggaggaaacaggtagacctacaatcgctccggctgggagattttctcgtttatactcacctgtaacgatttcaccatcagacgtgataacacgtggtggagatagtttttcatataatgtgtactcggcttttcgtgcgctgatgatttgataatccagtttatgtgtgcgtacgacttcgtgaagttcttcaaaagtgagatagtatatatcttctttttcatgaataacgcccgcttctatgagttgttcggcttctttcagtaaagcctgcttataaacgaagtaccgattaaccatgccgtattttggatattccctaaacccgctgaaattccggatgatatctatcattcgttttgtttctttggctttttgttcaccatccggtaattgcttcaatcgatctaataactcttgttctttcttcaaagcttcctgtcgcccttgctcaaatttccgatggctggcattaggctcactgttattgatattattaagaatcattgggataagtgtagttggtttttcgctccatcgagttcttgtaatatcaatttctccggtacatcgcattccgtatttgctgagataatcatagatcgcgtctcgggttttgcttccgccatcaaacttagccagttcatccaaaaaattatcatcttttacatgttgtaagtaatcaattacctctggataaggacgaatcacatctgcgacgtctaatagcgcaagacccatttctgaagtaatattatggggtacagattgagaaagcgtatctgctgcgtttttttcacctaaccactcgttcattttttcgttaatccataatgaagcattcatagcagttcgaatcacaacagaactttctgagttaaataaaatcttctttaattcctggatatcttccagaataaaacgaaataaatctgatcctgatttcgtttggatgttttgttttaactcttctatcgatgtttgactgctctcaatcaaatcagacacgattgtcggatcgttttcaacttgagccggcatatctgcattgcctctgctgggatttggtgctgttttatcatttggtatcgactttatgaaatctcgtcgccttattatggtcataagtgcgtcttttaagagctgatcgtgctgccccatgccttttaagaaaacttctctgctgtcaggggatgccagatgatgtgtgacatcaacaaatagccttccaccggctttacgcatgggtgcagcagtcgtcaacagaaaaaaagacaatcctagtggttttatgggatccgtcatcatttgttgatgaccaacagaaatatagacgtgattttcttggtcactcgcttcagggatggggaataaagtagtgattggacgactctgtacaatataaaaagtatcgcgggccaaacaccattcgatatcttgcggctggccgaaatgagcttcgatctgtcttccaatgcgttccagctgtaaaatttgttcatcagtcagtgtttgagccttttgctgatcagaatcgatctgatgtgtttctgttccgccttcttttcgtccgtagatagccaattttttagttgctattctcttatcgatgatttgcccatcctgtactttataacaatcggcagataccaatccggaaaccagtgcttcaccaagtccaaaaccggcatctatggataacacctttcggttggaggtaatcggatcagcggtaaataaaatccctgaagcctgaggaaaaaccatcctttgaacgataacggataaataaacttggctgtggccaaatccattttgcatacggtaaataaccgcgcgatccgtaaatagggacgcccagcatttactgatatgctgcaagattgcatcgacgccgataatatttaaataggtgtcttgttgaccggcaaaagaagcatgtggtaaatcttcagcagttgcactagaacgcacggcataggcatgttcctcgccgaactgggagagatagtgagccactgctttcacaacatcggaaggaatgtctacttccataatgatttgccgaatcttccggctgatgttaccaatctgatctcggtcctcaacttttagcatcgccaactgatccaacaacacttgtaacgtttcgttttgttcgatggcttttagatatcctactgttgtgacacaaaatccttctggtacttgtataccttgaatttttgataattcccctaaatgtaacccttttcctccaacgagcgaaaactgtgttttttcaatttcatgtaaaccgagaaccaaagaactcattctacatctccccttcaaaaaaatattgacaagagcttcctagcaggatataataaaattataagatggatatctataaccttttaaccagaaagcgcacgtagtgtgattatatcaccgtgtctgtttttgtgcaatataaaaagaacctgggcaatttcaccaggttctttcttaatttacataactagtcacattaaaaaacttggttcgatctgatacaatcctctaagggtatcctaaagttgggttcttttcgaactagtctgtcttgttccgtagagtccccatttatgaattagactttttgttcttaacagtcccaccgttaactagtataaagttatgaggatctggttaactactgagatatttttattttgagtaaggcttatgtttgataaagaagggttatgtaaaggtgtctgttgtgagcaagcgctgactacaaaaaattgatagcattctcatttaaataccattctattaacctatagaaaaagttataaaaccagatggagaatatcctacctccagtaattccaaggccgttcacctagtagaaaacaacctttaaccattactaacgattttaataatcattgattataaaacttctcaaggaacgatcatcagcccgttagctacccctgattaaagatgatctgctaccacactgttacgttagaacttccactactttgatatccttctgtcgccatgacttggtaagcccaattactgcccagattcattccatggctcttccatgcgttcacatgattgctgaaagtgattgtagcgttgcttccggttggtctcttcgtctgacgaacactccagtactgcgtaaaagtagtgcgatcgccatcaatggaaggtgcgttataacgtgtagttgtatatatgtcatatgtacccccatcactttttacagtacctttatacgttccggtaggcctataagtaccccatgaatccaccacataatattctatgaggggcgatctcgtccaaccatataaagttaaatatccattgccattcggtgcccaaactccggcattatagtttatcgtcctaaatggcgaacctgtagtccaacctttaccaacaacaaaatttccggtattagaccaattaacactgtaattcccgccagacccattgacagcgtttactataccgcccccatcagtccaattttgccagtagtctgtgctagctgcagaggcggttgccgaaaacaagctaatactcattaaagctgccgataatccaactaagaaattctttttaaacttaaacatatgttacctcctataatattttttccgactttgaggtagcactcgtatacatttaaaacattcttaattactaacgccaatgcttttgatcgtccccttcagtataataacacgaattcacgagtgaatattaaaagtatttgtaatttaattacaaatacctagaaacacattataagtggtcttcttccaccatatcctgatccttttttcgtaggatcacaattcttgtttctaattcagatggagtaatatctgcaatgaattcccattgaaccatttcaaataaaggagatacacattagagattgtgaaattattgtagctgccgcttgtctaatgaagggaagcaaatttatgaagaatatgaagaactgaagaagaaaacaattaaggttatactaagaaagaactgctcaattagaattattgaccaaaaatttgaggatgatagcttagatcagttttacaaagaagttgcaagatttttatttgaaaggactctgaaaaagaaaaaaagaattgacaatcagggtaactgtgggatgtaaccgagcctccaattcaaaataaaaatctttaaaattcttattttatttaaagagggactgtatatccctctttaaaattaagctttagattgctgctgaaagtaataaaaattgtacttttgatcaaacccttcttcgctaccacaaagaaaaataatgaattcaataaatgcgataatagaggggataccagtccagcaaaacaaaatatatagaataccttgtcctactcttcccaaataaaacttatgtattcccagacccccgaagaaaaatgctaataatgccgctacaattttgttcttcttgcttaccatgacttcctcctagctcattgctgccatttttaaaataatgctttcacattataatgcattttccaccagaaatcgcgaaaatttagaaattcttttgagatttttttatttaattgagaaatgaaagctcatataattgaactagatggttttgggaggtgtttattcaaaatgtatggcaaaagattacgtcaattacgaaaggcacacaaattaacaatggaacagttaggcgagaaaattggaattgcaaaatcaagttacggcgggtatgaagctgaaagcaaaaaaccaccattggacaagttgattattttagctaaactatacgatgtttcagttgattacatacttgggttaacagatgatcctgatcctaaaatggaaagaaaaaacctaaaagagtttttagaaaaaccagatattcactgggatggatataaacttacccctgagatgttagatcctatacggaaaattttgaagttggttactgcaaacaacaattaaaaagagcccttatgtgggcatttgcataaaacaattattttatctaaatctaaaaatttggattccaagcaaattcaatgttaccttctgttcttacgactaaatctttgcttaatctctctttgttaaccttatattctttgcagcttaaatattgagcttgtgcaatgaagttatcattacttgacattatgtatcttttgcgatcacttttccttccatactctttaaaaatatccataaatataacatctgctggcatcttaccatactttttatcatgcgttatctctggaaagttttctaaatgtctaaccttgtctatgattcgtacaatttccttcttcacatgacttctacgctttgaattcttcatgtagatctcaattttaaaacgttttaaattgtttgtacttgtgtctctgatatttttaacgatatactcttcttccttaatatcgtgataatgacaatgcaaagtataaattccgctaactgtatcatcatcttgaaaattcgcaccaaaaagactattcctacttattttatcaactaagtattgggcatctataccgttttgaatatatgcaataatatcagctgtatcagttaataagaaagaattaatttgtttgtcgttattaaatgtaaggaaaagcctatcggactcaggatacaacataactaatttaacaaaggtaaatataccaaactgaatcaattcattattagaaggaacttcatatgtagaaaaatagaggttgacttggttgtttatttcatccacattcaaaagattacatcttaaattataagttgacatctcgagttttatccaggattgataaacaatatcggttgtattcgaacaaattgactgagcaatgctcttataattctttacattaaattttacaataccggctagcaatccgttaaccagatcaattattttatatatctgtctcttaaattgagaaacacttacttccttacttttaggttttcctctgttagtgaagttaaagataattttatctttctcttttagataagttcccccatggttaatagcatttctaatatctacatcaatttcctttgttaaaattgtacacccttttgaattaagcaaattgactaaagggcctagattattttgacttaacaagtctttatcatctatggtgttaagcaaattcctcaaaaatttatatagattgctaactactccttcaactaacgaattatataaaggcaaatacttgacttgaatttcagtgtctctcggaattatagttttattaaataaattcaatgtactcagtacacgatcatatgatgaaagggctaaaaaaagttgtctagactgtctctgaagttctcaaaaaacaaatcagtgttaacgttcttgcattttacttcatcaattaagttgtaaataaaatctttaatatctttattccaaaactgtttctcctcatcaaatattaaatcataaattaacggaagccatgtcttaggtatatattgtatcccctcaatattttggtctattctctctttgtacaccttcataactaattcactatcaaaccccatgaaatctaatgatccaaatgcagcttcaacgtaatcactgttcaattattccctctcctagctcctcatttaataaaaggattcttttatcttaatagatgttaaatttacactctccccatctatttttaactgtctcactttctaattttaatttgaatatagctttaatagttcttccactggataactatctgttttatttatctctataaaatattctaactgccaattttgggttttaatagcttgtttgctagtgggattctcccatctagggtaaactcgaattgccatttttccttttgtgtcggatgttttaaggatattttgttttacaagaacttcttttggaaagacaaattgtccgaaattattatttctagtaaaagtgttgataaccaataaatcagttgccttttcatatgaaaaggcttggtttttaccatctccatctttttcccaaaaagaaacaaactgtcctatcttgttaggtgttatttttgcaactctaaatcttaccgattttgaatttaattgaaacatacccgccccatagtctgaattttgagcttcttcctggatagcatttagggttaagcgattaggtttatataaaactttatttacatatgttaacgccttataaaattcattcaatgctttgtttgtactccttatttatcgttgtattgcaacctttttcttatccatcttactcgacccctttcaaaataaagtaaagccaagcaattctgaattatttttatttctttttttgactcttaatttaatccattcttcatcatcagaatatggtttcttggttgttctataccatccgttaaaatgagcaactaactgaatcattattttctcagcttgacctttagagtccatccctaattgtgtaaaaccatttttactacttagcggatctcggtctcctggcttatcaaactgtttaagagctatgtagtatctcctgagtctgtaccaaagagttatagagccaccaaagtgatcccgatagtgattaacattaagttttggtttatagccctttgactttaaatattcggcaatttcttcagcgccaaattcttgacctatttgacctctttctttaagcacattctaaaccccactctgaataaaatgattatttcattactattatactacaattttccatggtcacactaaacaaaaagcagtctattcagatctgctttttattgttttcttcttttaactttttgtttattttgaacccaattaagatattgaaaatagctgctggaagatataaaactcctgcacctattattcctaatgcagtacttgagctcactataaatgtctgcatttctgtgtttcttgacttcaagcaaagtaatactaggaggccagctaaaccccccataagccgtgcaatacctggaataaagaaatctgttaggactccaaataattgccctataattgatagcataatccctaaaaaactggacaataaaactaaatttttaatgtcatttcaccccttttcaaagtatatcatcgggctcgtcatggtcaatcccatatttgcctttgattttctcgttcccacaaccaggattcttttcgactcataacgagctctcactagctgcgctcaatgtttttggtaataataggattttacccaatgataatttcttcccttattttcacaccattcaataaatccctttgattgtttttctgtaaacaacacccagtcatttaacagatcttgataatagttaagtgcttcgttattgttatttcttgtttgttgacattctaccttgttgtttaactgtattgacttaataataagtgctgtatcttctttaatatcgccaaggtacaaatcttcggatatatgatgaaatgaataccaaagtgcgttcaaatttatatcgattagcgttaataaggataattgttcattgctgccaccaagtctaagcgcattgtgtaagtaatcgacacgtttttcagtatttaaaaacacgccataccacctatatggccttggatcttccggattactcttcatccatccctcaagtaaaggctttaaaagttcctcttccaaaggatgaacgagtacatggtgaatatcatctgatgtttcaaataaatcaaatagccaacatgcaaacttctgttgggcattattatcccatatctttgcttcatcaataaaagaagataatgctttaaaggattccttacgtaaccctttttctttgagggagcagaacttttgaaataatggatattcatccaatctgtcacttttcaagatattagttaagatatttaccattgctcacatctctcttcgtttagaatcaagtccatgttatatttagcctttgtaccttgctatatcactaagaataacttgatttccattttcctttttctacacctggatgcatttcaaaatgattttaattgaacttgaaagtgatatgtacaataaactgagttgctatcttcaactataaagtatgtatcttggattaagaaatttgtaaagccaactgttttgagtatcgctttactcctcatgagcatatccatctggatatcattatcagttagaaggtccaaattaatagtaaacgctgtatgtaattcaaagaaagaattatcaaatttaaagtttaagattttcagacaccccccccaccttaccgtttcctttattatacagcgtgatcttatctaattaaaactgctgttttatacagaaaataatgtcctttgttcctttccctctcccgtccattgcagatgctagccacttcatagtttctttaatatagttttaataataaaagcttcatgaaaaaaggtgattttttgcccgcttgaacgccccctcaacatttttaaaaattccatgggcgtttcagtacattctcctttccaagtttttgtttcattgcctaaccattctcccgggtaacgtctttttcagatgacactttaatctctccattctgtgtgaaattgttgtttacttaattagatgccataacaaaaaaagcttcctaacttcagatgctggtacgctttctttcttaatatatgaacataaaacgactacgtgcattctcttgtaaattcaacctttctatatttagaaattttaatattcgaaatttatcctttccctctttacttatatatggaaaaaagtattatttacctaaatgaaaaatagttaaaaacgtagcagaaagaggttattaaatgaaaaagttatttgttacttttcttgtgctaatctccttaaaaagattgcactagtaagtattctctagctaccttgtcaaatgatgactgcaaaacaagctggggactatgtattgtgttcccaagtaaagaagttaaactttattctccaaagagtcctataaaggtagctgtattagatagtgggattaatagctctctgtctatttttgaaaatagttcaataacctcatatgatgctataaaaaacaattccactacaaaagattctttaggccatgatacagccatagcgggtgttattatggctcctttaaataaacaaacagtgcaaggaatatctcctcaagtgaaattattcgatgttaaggttcttaatgataaaggaggtggtgaagtccactctatgaaacaagtaaagtctgaatctgaagaatatgtattttttgagcctattttatgtaaggttaagcataaatttaagactaagcacggtaaactccgcataccttccttcgaatcctggagagtgtaatctctccgttacataactccttagagcctagcttttaaaatccgagtaaaaatttagtacatggatcaattagttgctatcgaataagaactttagtgaattaattgctcatgtcttttataaatttgaattgtccttttttatctaattctaaaaacaaatcaatccgattttgtgaactacttcttcctctaacttcactcattcttcactcatttttgcttgaaacatttcttctgcagatacttcatgagctttagcgatccaataaatatcttttaacagtttttgtgcattattatatgaccagattgtgtatggaaaccgagtttgaattacagcagtttcatcatctggagttgctaccgtatatggtaatgacctgtcaaagatctcagtgtcatagtcataccacaaccagagcatgtcagcagtattatgtatgtaatatcctaagtactctcgttgaaagttcatctgttcactcactgcttttaaatagaataactattttataatctcttcttaataccctccacttaaaatacagtataattgtaacttggatacactaatctatttacatataattacagtgtatttcattaaaaaatcaggagatgattttattgaaaattaaaaaggttattacaagttccctcttattaacgtctttatttatttccgctgctaccgcttatgctacacctgctacctctgttaaaagtcaagatgctatccgaatccaaggagatcaaatggaaatgactgtcgtgagatactacacccaagaagaatcccgtagtatcccttatacgattcaatatgcagagaatggttggtacggaaccttgactgcaactaattggaaacagcaatct
